(19) United States
(12) Patent Application Publication
(10) Pub. No.: US 2012/0096593 A1
(43) Pub. Date: Apr. 19, 2012

(54) Plants Having Enhanced Yield-Related Traits And/Or Enhanced Abiotic Stress Tolerance And A Method For Making The Same

(76) Inventors: Yves Hatzfeld, Lille (FR); Ana Isabel Sanz Molinero, Gentbrugge (BE); Valerie Frankard, Waterloo (BE); Christophe Reuzeau, Tocan Saint Apre (FR)

(21) Appl. No.: 13/318,995

(22) PCT Filed: Apr. 28, 2010
(86) PCT No.: PCT/EP2010/055675

§ 371 Date: Nov. 4, 2011

Related U.S. Application Data
(60) Provisional application No. 61/181,694, filed on May 28, 2009.
(60) Provisional application No. 61/181,697, filed on May 28, 2009.
(60) Provisional application No. 61/218,505, filed on Jun. 19, 2009.
(60) Provisional application No. 61/218,471, filed on Jun. 19, 2009.
(60) Provisional application No. 61/218,494, filed on Jun. 19, 2009.
(60) Provisional application No. 61/218,476, filed on Jun. 19, 2009.

(30) Foreign Application Priority Data
May 6, 2009 (EP) 09159540.5
May 20, 2009 (EP) 09160825.7
May 20, 2009 (EP) 09160832.3
May 20, 2009 (EP) 09160835.6
May 25, 2009 (EP) 09161000.6
May 25, 2009 (EP) 09161002.2

(51) Int. Cl. A01H 1/06; A01H 5/00; A01H 5/10; C07K 14/415; A01H 5/06; C12N 15/54; C12N 15/29; C12N 9/12; C12N 15/82; C12N 5/10

(52) U.S. Cl. 800/290; 800/298; 435/320.1; 435/419; 800/320.1; 800/320.2; 800/320.3; 800/320; 536/23.2; 536/23.6; 435/194; 530/376; 530/370

(57) ABSTRACT

The present invention relates generally to the field of molecular biology and concerns a method for improving various plant growth characteristics by modulating expression in a plant of a nucleic acid encoding a LDOX (leucoanthocyanidin dioxygenase) polypeptide, a nucleic acid encoding a YRP5, a nucleic acid encoding a CK1 (Casein Kinase type I) polypeptide, a nucleic acid encoding a bHLH12-like (basic Helix Loop Helix group polypeptide, a nucleic acid encoding an ADH2 polypeptide or a nucleic acid encoding a GCN5-like polypeptide. The present invention also concerns plants having modulated expression of a nucleic acid encoding an LDOX polypeptide, or a YRP5 polypeptide, or a CK1 polypeptide, or a bHLH12-like polypeptide, or an ADH2 polypeptide, or a GCN5-like polypeptide, which plants have improved growth characteristics relative to corresponding wild type plants or other control plants. The invention also provides constructs useful in the methods of the invention. The invention also provides hitherto unknown CK1-encoding nucleic acids and hitherto unknown bHLH12-like-encoding nucleic acids useful in per-forming the methods of the invention.

[0001] The present invention relates generally to the field of molecular biology and concerns a method for improving various plant growth characteristics by modulating expression in a plant of a nucleic acid encoding a LDOX (leucoanthocyanidin dioxygenase) polypeptide. The present invention also concerns plants having modulated expression of a nucleic acid encoding a LDOX polypeptide, which plants have improved growth characteristics relative to corresponding wild type plants or other control plants. The invention also provides constructs useful in the methods of the invention.

[0002] Furthermore the present invention relates concerns a method for enhancing abiotic stress tolerance in plants by modulating expression in a plant of a nucleic acid encoding a YRP5. The present invention also concerns plants having modulated expression of a nucleic acid encoding a YRP5, which plants have enhanced abiotic stress tolerance relative to corresponding wild type plants or other control plants. The invention also provides constructs useful in the methods of the invention.

[0003] The present invention also relates to a method for enhancing various economically important yield-related traits in plants. More specifically, the present invention concerns a method for enhancing yield-related traits in plants by modulating expression in a plant of a nucleic acid encoding a CK1 (Casein Kinase type I) polypeptide. The present invention also concerns plants having modulated expression of a nucleic acid encoding a CK1 polypeptide, which plants have enhanced yield-related traits relative to control plants. The invention also provides hitherto unknown CK1-encoding nucleic acids, and constructs comprising the same, useful in performing the methods of the invention.

[0004] The present invention also concerns a method for enhancing various economically important yield-related traits in plants. More specifically, the present invention concerns a method for enhancing yield-related traits in plants by modulating expression in a plant of a nucleic acid encoding a bHLH12-like (basic Helix Loop Helix group 12) polypeptide. The present invention also concerns plants having modulated expression of a nucleic acid encoding a bHLH12-like polypeptide, which plants have enhanced yield-related traits relative to control plants. The invention also provides hitherto unknown bHLH12-like-encoding nucleic acids, and constructs comprising the same, useful in performing the methods of the invention.

[0005] The present invention furthermore concerns a method for enhancing various yield-related traits in plants by modulating expression in a plant of a nucleic acid encoding an alcohol dehydrogenase (ADH2) polypeptide. The present invention also concerns plants having modulated expression of a nucleic acid encoding an ADH2 polypeptide, which plants have enhanced yield-related traits relative to corresponding wild type plants or other control plants. The invention also provides constructs useful in the methods of the invention.

[0006] The present invention aso concerns a method for improving various plant growth characteristics by modulating expression in a plant of a nucleic acid encoding a GCN5-like polypeptide. The present invention also concerns plants having modulated expression of a nucleic acid encoding a GCN5-like polypeptide, which plants have enhanced growth characteristics relative to corresponding wild type plants or other control plants. The invention also provides constructs useful in the methods of the invention.

[0007] The ever-increasing world population and the dwindling supply of arable land available for agriculture fuels research towards increasing the efficiency of agriculture. Conventional means for crop and horticultural improvements utilise selective breeding techniques to identify plants having desirable characteristics. However, such selective breeding techniques have several drawbacks, namely that these techniques are typically labour intensive and result in plants that often contain heterogeneous genetic components that may not always result in the desirable trait being passed on from parent plants. Advances in molecular biology have allowed mankind to modify the germplasm of animals and plants. Genetic engineering of plants entails the isolation and manipulation of genetic material (typically in the form of DNA or RNA) and the subsequent introduction of that genetic material into a plant. Such technology has the capacity to deliver crops or plants having various improved economic, agronomic or horticultural traits.

[0008] A trait of particular economic interest is increased yield. Yield is normally defined as the measurable produce of economic value from a crop. This may be defined in terms of quantity and/or quality. Yield is directly dependent on several factors, for example, the number and size of the organs, plant architecture (for example, the number of branches), seed production, leaf senescence and more. Root development, nutrient uptake, stress tolerance and early vigour may also be important factors in determining yield. Optimizing the abovementioned factors may therefore contribute to increasing crop yield.

[0009] Seed yield is a particularly important trait, since the seeds of many plants are important for human and animal nutrition. Crops such as corn, rice, wheat, canola and soybean account for over half the total human caloric intake, whether through direct consumption of the seeds themselves or through consumption of meat products raised on processed seeds. They are also a source of sugars, oils and many kinds of metabolites used in industrial processes. Seeds contain an embryo (the source of new shoots and roots) and an endosperm (the source of nutrients for embryo growth during germination and during early growth of seedlings). The development of a seed involves many genes, and requires the transfer of metabolites from the roots, leaves and stems into the growing seed. The endosperm, in particular, assimilates the metabolic precursors of carbohydrates, oils and proteins and synthesizes them into storage macromolecules to fill out the grain.

[0010] Plant biomass is yield for forage crops like alfalfa, silage corn and hay. Many proxies for yield have been used in grain crops. Chief amongst these are estimates of plant size. Plant size can be measured in many ways depending on species and developmental stage, but include total plant dry weight, above-ground dry weight, above-ground fresh weight, leaf area, stem volume, plant height, rosette diameter, leaf length, root length, root mass, tiller number and leaf number. Many species maintain a conservative ratio between the size of different parts of the plant at a given developmental stage. These allometric relationships are used to extrapolate from one of these measures of size to another (e.g. Tittonell et al 2005 Agric Ecosys & Environ 105: 213). Plant size at an early developmental stage will typically correlate with plant size later in development. A larger plant with a greater leaf area can typically absorb more light and carbon dioxide than a smaller plant and therefore will likely gain a greater weight during the same period (Fasoula & Tollenaar 2005 Maydica 50:39). This is in addition to the potential continuation of the micro-environmental or genetic advantage that the plant had to achieve the larger size initially. There is a strong genetic component to plant size and growth rate (e.g. ter Steege et al 2005 Plant Physiology 139:1078), and so for a range of diverse genotypes plant size under one environmental condition is likely to correlate with size under another (Hittalmani et al 2003 Theoretical Applied Genetics 107:679). In this way a standard environment is used as a proxy for the diverse and dynamic environments encountered at different locations and times by crops in the field.

[0011] Another important trait for many crops is early vigour. Improving early vigour is an important objective of modern rice breeding programs in both temperate and tropical rice cultivars. Long roots are important for proper soil anchorage in water-seeded rice. Where rice is sown directly into flooded fields, and where plants must emerge rapidly through water, longer shoots are associated with vigour. Where drill-seeding is practiced, longer mesocotyls and coleoptiles are important for good seedling emergence. The ability to engineer early vigour into plants would be of great importance in agriculture. For example, poor early vigour has been a limitation to the introduction of maize (Zea mays L.) hybrids based on Corn Belt germplasm in the European Atlantic.

[0012] Harvest index, the ratio of seed yield to aboveground dry weight, is relatively stable under many environmental conditions and so a robust correlation between plant size and grain yield can often be obtained (e.g. Rebetzke et al 2002 Crop Science 42:739). These processes are intrinsically linked because the majority of grain biomass is dependent on current or stored photosynthetic productivity by the leaves and stem of the plant (Gardener et al 1985 Physiology of Crop Plants. Iowa State University Press, pp 68-73). Therefore, selecting for plant size, even at early stages of development, has been used as an indicator for future potential yield (e.g. Tittonell et al 2005 Agric Ecosys & Environ 105: 213). When testing for the impact of genetic differences on stress tolerance, the ability to standardize soil properties, temperature, water and nutrient availability and light intensity is an intrinsic advantage of greenhouse or plant growth chamber environments compared to the field.

[0013] However, artificial limitations on yield due to poor pollination due to the absence of wind or insects, or insufficient space for mature root or canopy growth, can restrict the use of these controlled environments for testing yield differences. Therefore, measurements of plant size in early development, under standardized conditions in a growth chamber or greenhouse, are standard practices to provide indication of potential genetic yield advantages.

[0014] A further important trait is that of improved abiotic stress tolerance. Abiotic stress is a primary cause of crop loss worldwide, reducing average yields for most major crop plants by more than 50% (Wang et al., Planta (2003) 218: 1-14). Abiotic stresses may be caused by drought, salinity, extremes of temperature, chemical toxicity and oxidative stress. The ability to improve plant tolerance to abiotic stress would be of great economic advantage to farmers worldwide and would allow for the cultivation of crops during adverse conditions and in territories where cultivation of crops may not otherwise be possible.

[0015] Crop yield may therefore be increased by optimising one of the above-mentioned factors.

[0016] Depending on the end use, the modification of certain yield traits may be favoured over others. For example for applications such as forage or wood production, or bio-fuel resource, an increase in the vegetative parts of a plant may be desirable, and for applications such as flour, starch or oil production, an increase in seed parameters may be particularly desirable. Even amongst the seed parameters, some may be favoured over others, depending on the application. Various mechanisms may contribute to increasing seed yield, whether that is in the form of increased seed size or increased seed number.

[0017] One approach to increasing yield (seed yield and/or biomass) in plants may be through modification of the inherent growth mechanisms of a plant, such as the cell cycle or various signalling pathways involved in plant growth or in defense mechanisms.

[0018] It has now been found that various growth characteristics may be improved in plants by modulating expression in a plant of a nucleic acid encoding an LDOX polypeptide, or a CK1 polypeptide, or a bHLH12-like polypeptide, or a GCN5-like polypeptide in a plant.

[0019] It has now also been found that various yield-related traits may be improved in plants by modulating expression in a plant of a nucleic acid encoding an ADH2 polypeptide in a plant.

[0020] It has now also been found that tolerance to various abiotic stresses may be enhanced in plants by modulating expression in a plant of a nucleic acid encoding a YRP5 polypeptide.

### BACKGROUND

### 1. Leucoanthocyanidin Dioxygenase (LDOX) Polypeptides

[0021] Flavonoids represent a large group of plant secondary metabolites, comprising flavonols, isoflavones, proanthocyanidins and anthocyanins. They play an important role in plant biology, such as signalling for pollinators or seed dispersing animals, plant hormone signalling, pollen-tube formation, or UV protection.

[0022] Within the flavonoids, the anthocyanins are secondary metabolites that, besides having other functions, provide colours to flower petals, fruit skins, and seed coats. Anthocyanins are produced by the phenylpropanoid pathway, starting with the conversion of phenylalanine into cinnamic acid by phenylalanine ammonia lyase (PAL). The pathway then splits into several branches, one being the flavonoid pathway, in which chalcone synthase (CHS) catalyses the formation of the flavonoid skeleton and subsequently leads to flavonol, cyanidin, and anthocyanin synthesis. An overview of anthocyanin synthesis is given in Abrahams et al. (Plant J. 35, 624-636, 2003), reproduced in FIG. 1. Leucoanthocyanidin dioxygenase (LDOX) is an enzyme involved in late stages of the biosynthesis of flavonoids, it participates in the enzymatic reaction converting leucocyanidin into cyanidin which is a precursor of anthocyanin and epicathecin. The latter is then polymerized into proanthocyanidins. The gene encoding LDOX is part of a multigene family in Arabidopsis.

[0023] It has been shown that plant anthocyanin production is induced by a wide range of biotic and abiotic stressors such as pathogen attack, wounding, UV light, low temperature, heavy metal contamination, and nutrient stress such as phosphorus (Pi) limitation (Steyn et al., New Phytologist 155, 349-361, 2002; Gould, J. Biomed. Biotechnol. 2004, 314-320, 2004). Flavonoids have attracted attention as food additives (natural colours) and may find use in pharmaceutical applications as antioxidants. They also may reduce risks on diabetes or cancer.

### 2. Casein Kinase Type I (CK1) Polypeptides

[0024] The Casein kinase 1 family (EC 2.7.11.1) of protein kinases are serine/threonine-selective enzymes that function as regulators of signal transduction pathways in most eukaryotic cell types.

[0025] Casein kinase activity was found to be present in most cell types and to be associated with multiple enzymes. The type 1 casein kinase family of related gene products are now given designations such as “casein kinase 1”. In Xenopus and Drosophila cells, Casein kinase 1 has been suggested to play a role in the Wnt signaling pathway. CK1gamma is associated with the cell membrane a and binds to LRP. CK1gamma was found to be needed for Wnt signaling through LRP. Davidson et al. 2005. Nature Volume 438, pages 867-872).

[0026] In plants, casein kinase have been associated to plasmodesmata (Lee 2005, Plant Cell. 17; 2817-2831.

3. Basic Helix Loop Helix Group 12 (bHLH12-Like) Polypeptides

[0027] Basic helix-loop-helix proteins (bHLH) are a group of eukaryotic transcription factors that exert a determinative influence in a variety of developmental pathways. These transcription factors are characterised by a highly evolutionary conserved bHLH domain that mediates specific dimerisation. They facilitate the conversion of inactive monomers to trans-activating dimers at appropriate stages of development. The bHLH proteins can be classified into discrete categories. One such subdivision according to dimerisation, DNA binding and expression characteristics defines seven groups. Class I proteins form dimers within the group or with class II proteins. Class II can only form heterodimers with class I factors. Class III factors are characterised by the presence of a leucine zipper adjacent to the bHLH domain. Class IV factors may form homodimers or heterodimers with class III proteins. Class V and class VI proteins act as regulators of class I and class II factors and class VII proteins have a PAS domain.

[0028] bHLH domains are well known in the art and may readily be identified by persons skilled in the art. The family is defined by a bHLH signature domain, which consists of 60 or so amino acids with two functionally distinct regions. A basic region, located at the N-terminal end of the domain, is involved in DNA binding and consists of 15 or so amino acids with a high number of basic residues. An HLH region, at the C-terminal end, functions as a dimerization domain and mainly comprises hydrophobic residues that form two amphipathic helices separated by a loop region of variable sequence and length.

[0029] Heim et al. in 2003 classified the plant bHLH proteins into groups and subgroups based on structural similarities. It was proposed that bHLH proteins perform similar biological functions in a plant (Heim et al. 2003, Mol. Biol. Evol. 20(5):735-747. 2003).

[0030] Recently, three members of group XII, AtbHLH044/BEE1, AtbHLH058/BEE2, and AtbHLH050/BEE3 (BR Enhanced Expression) from A. thaliana have been linked to Brassinosteroid signaling (Friedrichsen et al. 2002, Genetics 162:1445-1456.). These closely related bHLHs act redundantly as positive regulators in the early Brassinosteroid (BR) signaling pathway and they also affect signalling by abscisic acid (ABA), a known antagonist of BR.

### 4. Alcohol Dehydrogenase (ADH2) Polypeptides

[0031] The MDR (medium-chain dehydrogenase/reductase) superfamily comprises the family of alcohol dehydrogenases (ADH). Alcohol dehydrogenase (EC: 1.1.1.1) catalyzes the reversible oxidation of alcohols to their corresponding acetaldehyde or ketone with the concomitant reduction of NAD: alcohol+NAD=aldehyde or ketone+NADH.

[0032] Currently three structurally and catalytically different types of alcohol dehydrogenase are known:
[0033] 1. Zinc-containing “long chain” alcohol dehydrogenases;
[0034] 2. Insect-type “short-chain” alcohol dehydrogenases;
[0035] 3. Iron-containing alcohol dehydrogenases.

[0036] There are two types of ADH in plants: Class III ADH (formaldehyde dehydrogenase dependent on glutathionone) and Plant ADH. ADH2 codes for the GSH-dependent formaldehyde dehydrogenase (FALDH), also known as class III ADH. This enzyme has been shown to be the S-nitrosoglutathione reductase (GSNOR). See Rusterucci et al: Plant Physiol. 2007 March; 143(3): 1282-1292. Lee et al., 2008 (The Plant Cell, Vol. 20: 786-802) also report that the evolutionarily conserved, GSH-dependent formaldehyde dehydrogenase (FALDH), a type III alcohol dehydrogenase, has activity as a GSNOR.

### 5. GCN5-Like Polypeptides

[0037] Bhat, R. et. at (The Plant Journal. 2003, 33, 455-469) discloses the role played by histone acetyltransferase (HAT), GCN5, in transcriptional co-activation in yeast and mammals. For that purpose, the authors cloned and expressed the pattern of Zmgcn5, the maize homologue and observed that the inhibition of histone deacetylation with TSA is accompanied by a decrease in the abundance of ZmGCN5 acetylase protein, but by increases in mRNAs for histones H2A, H2B, H3 and H4. The elevated histone mRNA levels were not reflected in increasing histone protein concentrations, suggesting hyperacetylated histones arising from TSA treatment may be preferentially degraded and substituted by de novo synthesised histones. The ZmGCN5 antisense material showed suppression of the endogenous ZmGCN5 transcript and the profiling analysis revealed increased mRNA levels for H2A, H2B and H4.

[0038] Benhamed, M. et. al (The Plant Cell. 2006, 18, 2893-2903) focus on the requirement of Arabidopsis thaliana histone acetyltransferase TAF1/HAF2 for the light regulation of growth and gene expression, and that histone acetyltransferase GCN5 and histone deacetylase HD1/HDA19 are also involved in such regulation. The authors have observed that mutation of GCN5 resulted in a long-hypocotyl phenotype and reduced light-inducible gene expression, whereas mutation of HD1 induced opposite effects. The double mutant gcn5 hd1 restored a normal photomorphogenic phenotype. By contrast, the double mutant gcn5 taf1 resulted in further loss of light-regulated gene expression. gcn5 reduced acetylation of histones H3 and H4, mostly on the core promoter regions, whereas hd1 increased acetylation on both core and more upstream promoter regions. GCN5 and TAF1 were both required for H3K9, H3K27, and H4K12 acetylation on the target promoters, but H3K14 acetylation was dependent only on GCN5. They have also concluded that GCN5 is directly associated with the light-responsive promoters.

[0039] Bertrand C. et. al (The Journal of Biological Chemistry. 2003, 278, 30 28246-28251) discloses the regulatory function of GCN5 gene (AtGCN5) in controlling floral meristem activity by characterizing a mutation in the Arabidopsis gene. The authors have observed that in addition to pleiotropic effects on plant development, this mutation also leads to the production of terminal flowers and that AtGCN5 is required to regulate the floral meristem activity through the WUS/AG pathway.

[0040] Benhamed, M. et. al (The Plant Journal. 2008, 56, 493-504) focused on the Arabidopsis thaliana promoter regions. The authors have observed that the Arabidopsis histone acetyltransferase GCN5 was associated with 40% of the tested promoters. At most sites, binding did not depend on the integrity of the GCN5 bromodomain but the presence of the bromodomain was necessary for binding to 11% of the promoter regions, and correlated with acetylation of lysine 14 of histone H3. They also concluded that in these promoters in addition to its transcriptional activation function, GCN5 may play an important role in priming activation of inducible genes under non-induced conditions.

[0041] Nagy, Z. and Tora, L. (Oncogene. 2007, 26, 5341-5357) discloses the recent evolution of our under standing of the function of two histone acetyl transferases (ATs) from metazoan organisms: GCN5 and PCAF and their role in eukaryotes transcription. It is also referred that metazoan GCN5 is a subunit of at least two types of multiprotein complexes, one having a molecular weight of 2MDa (SPT3-TAF9-GCN5 acetyl transferase/TATA binding protein (TBP)-free-TAF complex) and a second type with about a size of 700 kDa (ATAC complex). These complexes possess global histone acetylation activity and locus-specific co-activator functions together with AT activity on non-histone substrates. The authors also concluded that their biological functions cover a wide range of tasks and render them indispensable for the normal function of cells and also that the deregulation of the global and/or specific AT activities of these complexes lead to the cancerous transformation of the cells.

### SUMMARY

### 1. Leucoanthocyanidin Dioxygenase (LDOX) Polypeptides

[0042] Surprisingly, it has now been found that modulating expression of a nucleic acid encoding a LDOX polypeptide gives plants having enhanced yield-related traits, in particular increased yield and increased early vigour, relative to control plants.

[0043] According one embodiment, there is provided a method for improving yield related traits of a plant relative to control plants, comprising modulating expression of a nucleic acid encoding a LDOX polypeptide in a plant.

### 2. YRP5 Polypeptides

[0044] Surprisingly, it has now been found that modulating expression of a nucleic acid encoding a YRP5 polypeptide gives plants having enhanced tolerance to various abiotic stresses relative to control plants.

[0045] According one embodiment, there is provided a method for enhancing tolerance in plants to various abiotic stresses, relative to tolerance in control plants, comprising modulating expression of a nucleic acid encoding a YRP5 polypeptide in a plant.

### 3. Casein Kinase Type I (CK1) Polypeptides

[0046] Surprisingly, it has now been found that modulating expression of a nucleic acid encoding a CK1 polypeptide gives plants having enhanced yield-related traits relative to control plants.

[0047] According one embodiment, there is provided a method for enhancing yield related traits of a plant relative to control plants, comprising modulating expression of a nucleic acid encoding a CK1 polypeptide in a plant.

4. Basic Helix Loop Helix Group 12 (bHLH12-Like) Polypeptides

[0048] Surprisingly, it has now been found that modulating expression of a nucleic acid encoding a bHLH12-like polypeptide gives plants having enhanced yield-related traits relative to control plants.

[0049] According one embodiment, there is provided a method for enhancing yield related traits of a plant relative to control plants, comprising modulating expression of a nucleic acid encoding a bHLH12-like polypeptide in a plant.

### 5. Alcohol Dehydrogenase (ADH2) Polypeptides

[0050] Surprisingly, it has now been found that modulating expression of a nucleic acid encoding a ADH2 polypeptide gives plants having enhanced yield-related traits, in particular (increased seed yield) relative to control plants.

[0051] According one embodiment, there is provided a method for enhancing yield-related traits in plants relative to control plants, comprising modulating expression of a nucleic acid encoding an ADH2 polypeptide in a plant.

### 6. GCN5-Like Polypeptides

[0052] Surprisingly, it has now been found that modulating expression of a nucleic acid encoding a GCN5-like polypeptide gives plants having enhanced yield-related traits, in particular increased yield relative to control plants.

[0053] According one embodiment, there is provided a method for improving yield related traits of a plant relative to control plants, comprising modulating expression of a nucleic acid encoding a GCN5-like polypeptide in a plant.

### DEFINITIONS

### Polypeptide(s)/Protein(s)

[0054] The terms “polypeptide” and “protein” are used interchangeably herein and refer to amino acids in a polymeric form of any length, linked together by peptide bonds.

### Polynucleotide(s)/Nucleic Acid(s)/Nucleic Acid Sequence(s)/Nucleotide Sequence(s)

[0055] The terms “polynucleotide(s)”, “nucleic acid sequence(s)”, “nucleotide sequence(s)”, “nucleic acid(s)”, “nucleic acid molecule” are used interchangeably herein and refer to nucleotides, either ribonucleotides or deoxyribonucleotides or a combination of both, in a polymeric unbranched form of any length.

### Homologue(s)

[0056] “Homologues” of a protein encompass peptides, oligopeptides, polypeptides, proteins and enzymes having amino acid substitutions, deletions and/or insertions relative to the unmodified protein in question and having similar biological and functional activity as the unmodified protein from which they are derived.

[0057] A deletion refers to removal of one or more amino acids from a protein.

[0058] An insertion refers to one or more amino acid residues being introduced into a predetermined site in a protein. Insertions may comprise N-terminal and/or C-terminal fusions as well as intra-sequence insertions of single or multiple amino acids. Generally, insertions within the amino acid sequence will be smaller than N- or C-terminal fusions, of the order of about 1 to 10 residues. Examples of N- or C-terminal fusion proteins or peptides include the binding domain or activation domain of a transcriptional activator as used in the yeast two-hybrid system, phage coat proteins, (histidine)-6-tag, glutathione S-transferase-tag, protein A, maltose-binding protein, dihydrofolate reductase, Tag•100 epitope, c-myc epitope, FLAG®-epitope, lacZ, CMP (calmodulin-binding peptide), HA epitope, protein C epitope and VSV epitope.

[0059] A substitution refers to replacement of amino acids of the protein with other amino acids having similar properties (such as similar hydrophobicity, hydrophilicity, antigenicity, propensity to form or break α-helical structures or β-sheet structures). Amino acid substitutions are typically of single residues, but may be clustered depending upon functional constraints placed upon the polypeptide and may range from 1 to 10 amino acids; insertions will usually be of the order of about 1 to 10 amino acid residues. The amino acid substitutions are preferably conservative amino acid substitutions. Conservative substitution tables are well known in the art (see for example Creighton (1984) Proteins. W.H. Freeman and Company (Eds) and Table 1 below).

TABLE 1
Examples of conserved amino acid substitutions

| Residue | Conservative Substitutions |
|---|---|
| Ala | Ser |
| Arg | Lys |
| Asn | Gln; His |
| Asp | Glu |
| Gln | Asn |
| Cys | Ser |
| Glu | Asp |
| Gly | Pro |
| His | Asn; Gln |
| Ile | Leu, Val |
| Leu | Ile; Val |
| Lys | Arg; Gln |
| Met | Leu; Ile |
| Phe | Met; Leu; Tyr |
| Ser | Thr; Gly |
| Thr | Ser; Val |
| Trp | Tyr |
| Tyr | Trp; Phe |
| Val | Ile; Leu |

[0060] Amino acid substitutions, deletions and/or insertions may readily be made using peptide synthetic techniques well known in the art, such as solid phase peptide synthesis and the like, or by recombinant DNA manipulation. Methods for the manipulation of DNA sequences to produce substitution, insertion or deletion variants of a protein are well known in the art. For example, techniques for making substitution mutations at predetermined sites in DNA are well known to those skilled in the art and include M13 mutagenesis, T7-Gen in vitro mutagenesis (USB, Cleveland, Ohio), QuickChange Site Directed mutagenesis (Stratagene, San Diego, Calif.), PCR-mediated site-directed mutagenesis or other site-directed mutagenesis protocols.

### Derivatives

[0061] “Derivatives” include peptides, oligopeptides, polypeptides which may, compared to the amino acid sequence of the naturally-occurring form of the protein, such as the protein of interest, comprise substitutions of amino acids with non-naturally occurring amino acid residues, or additions of non-naturally occurring amino acid residues. “Derivatives” of a protein also encompass peptides, oligopeptides, polypeptides which comprise naturally occurring altered (glycosylated, acylated, prenylated, phosphorylated, myristoylated, sulphated etc.) or non-naturally altered amino acid residues compared to the amino acid sequence of a naturally-occurring form of the polypeptide. A derivative may also comprise one or more non-amino acid substituents or additions compared to the amino acid sequence from which it is derived, for example a reporter molecule or other ligand, covalently or non-covalently bound to the amino acid sequence, such as a reporter molecule which is bound to facilitate its detection, and non-naturally occurring amino acid residues relative to the amino acid sequence of a naturally-occurring protein. Furthermore, “derivatives” also include fusions of the naturally-occurring form of the protein with tagging peptides such as FLAG, HIS6 or thioredoxin (for a review of tagging peptides, see Terpe, Appl. Microbiol. Biotechnol. 60, 523-533, 2003).

### Orthologue(s)/Paralogue(s)

[0062] Orthologues and paralogues encompass evolutionary concepts used to describe the ancestral relationships of genes. Paralogues are genes within the same species that have originated through duplication of an ancestral gene; orthologues are genes from different organisms that have originated through speciation, and are also derived from a common ancestral gene.

### Domain, Motif/Consensus Sequence/Signature

[0063] The term “domain” refers to a set of amino acids conserved at specific positions along an alignment of sequences of evolutionarily related proteins. While amino acids at other positions can vary between homologues, amino acids that are highly conserved at specific positions indicate amino acids that are likely essential in the structure, stability or function of a protein. Identified by their high degree of conservation in aligned sequences of a family of protein homologues, they can be used as identifiers to determine if any polypeptide in question belongs to a previously identified polypeptide family.

[0064] The term “motif” or “consensus sequence” or “signature” refers to a short conserved region in the sequence of evolutionarily related proteins. Motifs are frequently highly conserved parts of domains, but may also include only part of the domain, or be located outside of conserved domain (if all of the amino acids of the motif fall outside of a defined domain).

[0065] Specialist databases exist for the identification of domains, for example, SMART (Schultz et al. (1998) Proc. Natl. Acad. Sci. USA 95, 5857-5864; Letunic et al. (2002) Nucleic Acids Res 30, 242-244), InterPro (Mulder et al., (2003) Nucl. Acids. Res. 31, 315-318), Prosite (Bucher and Bairoch (1994), A generalized profile syntax for biomolecular sequences motifs and its function in automatic sequence interpretation. (In) ISMB-94; Proceedings 2nd International Conference on Intelligent Systems for Molecular Biology. Altman R., Brutlag D., Karp P., Lathrop R., Searls D., Eds., pp 53-61, AAAI Press, Menlo Park; Hulo et al., Nucl. Acids. Res. 32:D134-D137, (2004)), or Pfam (Bateman et al., Nucleic Acids Research 30(1): 276-280 (2002)). A set of tools for in silico analysis of protein sequences is available on the ExPASy proteomics server (Swiss Institute of Bioinformatics (Gasteiger et al., ExPASy: the proteomics server for in-depth protein knowledge and analysis, Nucleic Acids Res. 31:3784-3788 (2003)). Domains or motifs may also be identified using routine techniques, such as by sequence alignment.

[0066] Methods for the alignment of sequences for comparison are well known in the art, such methods include GAP, BESTFIT, BLAST, FASTA and TFASTA. GAP uses the algorithm of Needleman and Wunsch ((1970) J Mol Biol 48: 443-453) to find the global (i.e. spanning the complete sequences) alignment of two sequences that maximizes the number of matches and minimizes the number of gaps. The BLAST algorithm (Altschul et al. (1990) J Mol Biol 215: 403-10) calculates percent sequence identity and performs a statistical analysis of the similarity between the two sequences. The software for performing BLAST analysis is publicly available through the National Centre for Biotechnology Information (NCBI).

[0067] Homologues may readily be identified using, for example, the ClustalW multiple sequence alignment algorithm (version 1.83), with the default pairwise alignment parameters, and a scoring method in percentage. Global percentages of similarity and identity may also be determined using one of the methods available in the MatGAT software package (Campanella et al., BMC Bioinformatics. 2003 Jul. 10; 4:29. MatGAT: an application that generates similarity/identity matrices using protein or DNA sequences.). Minor manual editing may be performed to optimise alignment between conserved motifs, as would be apparent to a person skilled in the art. Furthermore, instead of using full-length sequences for the identification of homologues, specific domains may also be used. The sequence identity values may be determined over the entire nucleic acid or amino acid sequence or over selected domains or conserved motif(s), using the programs mentioned above using the default parameters. For local alignments, the Smith-Waterman algorithm is particularly useful (Smith T F, Waterman M S (1981) J. Mol. Biol. 147(1); 195-7).

### Reciprocal BLAST

[0068] Typically, this involves a first BLAST involving BLASTing a query sequence (for example using any of the sequences listed in Table A of the Examples section) against any sequence database, such as the publicly available NCBI database. BLASTN or TBLASTX (using standard default values) are generally used when starting from a nucleotide sequence, and BLASTP or TBLASTN (using standard default values) when starting from a protein sequence. The BLAST results may optionally be filtered. The full-length sequences of either the filtered results or non-filtered results are then BLASTed back (second BLAST) against sequences from the organism from which the query sequence is derived. The results of the first and second BLASTs are then compared. A paralogue is identified if a high-ranking hit from the first blast is from the same species as from which the query sequence is derived, a BLAST back then ideally results in the query sequence amongst the highest hits; an orthologue is identified if a high-ranking hit in the first BLAST is not from the same species as from which the query sequence is derived, and preferably results upon BLAST back in the query sequence being among the highest hits.

[0069] High-ranking hits are those having a low E-value. The lower the E-value, the more significant the score (or in other words the lower the chance that the hit was found by chance). Computation of the E-value is well known in the art. In addition to E-values, comparisons are also scored by percentage identity. Percentage identity refers to the number of identical nucleotides (or amino acids) between the two compared nucleic acid (or polypeptide) sequences over a particular length. In the case of large families, ClustalW may be used, followed by a neighbour joining tree, to help visualize clustering of related genes and to identify orthologues and paralogues.

### Hybridisation

[0070] The term “hybridisation” as defined herein is a process wherein substantially homologous complementary nucleotide sequences anneal to each other. The hybridisation process can occur entirely in solution, i.e. both complementary nucleic acids are in solution. The hybridisation process can also occur with one of the complementary nucleic acids immobilised to a matrix such as magnetic beads, Sepharose beads or any other resin. The hybridisation process can furthermore occur with one of the complementary nucleic acids immobilised to a solid support such as a nitro-cellulose or nylon membrane or immobilised by e.g. photolithography to, for example, a siliceous glass support (the latter known as nucleic acid arrays or microarrays or as nucleic acid chips). In order to allow hybridisation to occur, the nucleic acid molecules are generally thermally or chemically denatured to melt a double strand into two single strands and/or to remove hairpins or other secondary structures from single stranded nucleic acids.

[0071] The term “stringency” refers to the conditions under which a hybridisation takes place. The stringency of hybridisation is influenced by conditions such as temperature, salt concentration, ionic strength and hybridisation buffer composition. Generally, low stringency conditions are selected to be about 30° C. lower than the thermal melting point (Tₘ) for the specific sequence at a defined ionic strength and pH. Medium stringency conditions are when the temperature is 20° C. below Tₘ, and high stringency conditions are when the temperature is 10° C. below Tₘ. High stringency hybridisation conditions are typically used for isolating hybridising sequences that have high sequence similarity to the target nucleic acid sequence. However, nucleic acids may deviate in sequence and still encode a substantially identical polypeptide, due to the degeneracy of the genetic code. Therefore medium stringency hybridisation conditions may sometimes be needed to identify such nucleic acid molecules.

[0072] The Tm is the temperature under defined ionic strength and pH, at which 50% of the target sequence hybridises to a perfectly matched probe. The Tₘ is dependent upon the solution conditions and the base composition and length of the probe. For example, longer sequences hybridise specifically at higher temperatures. The maximum rate of hybridisation is obtained from about 16° C. up to 32° C. below Tₘ. The presence of monovalent cations in the hybridisation solution reduce the electrostatic repulsion between the two nucleic acid strands thereby promoting hybrid formation; this effect is visible for sodium concentrations of up to 0.4M (for higher concentrations, this effect may be ignored). Formamide reduces the melting temperature of DNA-DNA and DNA-RNA duplexes with 0.6 to 0.7° C. for each percent formamide, and addition of 50% formamide allows hybridisation to be performed at 30 to 45° C., though the rate of hybridisation will be lowered. Base pair mismatches reduce the hybridisation rate and the thermal stability of the duplexes. On average and for large probes, the Tm decreases about 1° C. per % base mismatch. The Tm may be calculated using the following equations, depending on the types of hybrids:

1) DNA-DNA hybrids (Meinkoth and Wahl, Anal. Biochem., 138: 267-284, 1984):

Tₘ=81.5° C.+16.6×log₁₀[Na⁺]^{a}+0.41×%[G/C^{b}]−500×[L^{c}]⁻¹−0.61×% formamide

2) DNA-RNA or RNA-RNA hybrids:

Tₘ=79.8+18.5 (log₁₀[Na⁺]^{a})+0.58 (% G/C^{b})+11.8 (% G/C^{b})²−820/L^{c}

3) oligo-DNA or oligo-RNAs hybrids:

For <20 nucleotides: Tₘ=2(Iₙ)

For 20-35 nucleotides: Tₘ=22+1.46(Iₙ)

^{a} or for other monovalent cation, but only accurate in the 0.01-0.4 M range.
^{b} only accurate for % GC in the 30% to 75% range.
^{c} L=length of duplex in base pairs.
^{d} oligo, oligonucleotide; Iₙ, =effective length of primer=2×(no. of G/C)+(no. of A/T).

[0073] Non-specific binding may be controlled using any one of a number of known techniques such as, for example, blocking the membrane with protein containing solutions, additions of heterologous RNA, DNA, and SDS to the hybridisation buffer, and treatment with Rnase. For non-homologous probes, a series of hybridizations may be performed by varying one of (i) progressively lowering the annealing temperature (for example from 68° C. to 42° C.) or (ii) progressively lowering the formamide concentration (for example from 50% to 0%). The skilled artisan is aware of various parameters which may be altered during hybridisation and which will either maintain or change the stringency conditions.

[0074] Besides the hybridisation conditions, specificity of hybridisation typically also depends on the function of post-hybridisation washes. To remove background resulting from non-specific hybridisation, samples are washed with dilute salt solutions. Critical factors of such washes include the ionic strength and temperature of the final wash solution: the lower the salt concentration and the higher the wash temperature, the higher the stringency of the wash. Wash conditions are typically performed at or below hybridisation stringency. A positive hybridisation gives a signal that is at least twice of that of the background. Generally, suitable stringent conditions for nucleic acid hybridisation assays or gene amplification detection procedures are as set forth above. More or less stringent conditions may also be selected. The skilled artisan is aware of various parameters which may be altered during washing and which will either maintain or change the stringency conditions.

[0075] For example, typical high stringency hybridisation conditions for DNA hybrids longer than 50 nucleotides encompass hybridisation at 65° C. in 1×SSC or at 42° C. in 1×SSC and 50% formamide, followed by washing at 65° C. in 0.3×SSC. Examples of medium stringency hybridisation conditions for DNA hybrids longer than 50 nucleotides encompass hybridisation at 50° C. in 4×SSC or at 40° C. in 6×SSC and 50% formamide, followed by washing at 50° C. in 2×SSC. The length of the hybrid is the anticipated length for the hybridising nucleic acid. When nucleic acids of known sequence are hybridised, the hybrid length may be determined by aligning the sequences and identifying the conserved regions described herein. 1×SSC is 0.15M NaCl and 15 mM sodium citrate; the hybridisation solution and wash solutions may additionally include 5×Denhardt's reagent, 0.5-1.0% SDS, 100 μg/ml denatured, fragmented salmon sperm DNA, 0.5% sodium pyrophosphate.

[0076] For the purposes of defining the level of stringency, reference can be made to Sambrook et al. (2001) Molecular Cloning: a laboratory manual, 3^{rd} Edition, Cold Spring Harbor Laboratory Press, CSH, New York or to Current Protocols in Molecular Biology, John Wiley & Sons, N.Y. (1989 and yearly updates).

### Splice Variant

[0077] The term “splice variant” as used herein encompasses variants of a nucleic acid sequence in which selected introns and/or exons have been excised, replaced, displaced or added, or in which introns have been shortened or lengthened. Such variants will be ones in which the biological activity of the protein is substantially retained; this may be achieved by selectively retaining functional segments of the protein. Such splice variants may be found in nature or may be manmade. Methods for predicting and isolating such splice variants are well known in the art (see for example Foissac and Schiex (2005) BMC Bioinformatics 6: 25).

### Allelic Variant

[0078] Alleles or allelic variants are alternative forms of a given gene, located at the same chromosomal position. Allelic variants encompass Single Nucleotide Polymorphisms (SNPs), as well as Small Insertion/Deletion Polymorphisms (INDELs). The size of INDELs is usually less than 100 bp. SNPs and INDELs form the largest set of sequence variants in naturally occurring polymorphic strains of most organisms.

### Endogenous Gene

[0079] Reference herein to an “endogenous” gene not only refers to the gene in question as found in a plant in its natural form (i.e., without there being any human intervention), but also refers to that same gene (or a substantially homologous nucleic acid/gene) in an isolated form subsequently (re)introduced into a plant (a transgene). For example, a transgenic plant containing such a transgene may encounter a substantial reduction of the transgene expression and/or substantial reduction of expression of the endogenous gene. The isolated gene may be isolated from an organism or may be manmade, for example by chemical synthesis.

### Gene Shuffling/Directed Evolution

[0080] Gene shuffling or directed evolution consists of iterations of DNA shuffling followed by appropriate screening and/or selection to generate variants of nucleic acids or portions thereof encoding proteins having a modified biological activity (Castle et al., (2004) Science 304(5674): 1151-4; U.S. Pat. Nos. 5,811,238 and 6,395,547).

### Construct

[0081] Additional regulatory elements may include transcriptional as well as translational enhancers. Those skilled in the art will be aware of terminator and enhancer sequences that may be suitable for use in performing the invention. An intron sequence may also be added to the 5′ untranslated region (UTR) or in the coding sequence to increase the amount of the mature message that accumulates in the cytosol, as described in the definitions section. Other control sequences (besides promoter, enhancer, silencer, intron sequences, 3′UTR and/or 5′UTR regions) may be protein and/or RNA stabilizing elements. Such sequences would be known or may readily be obtained by a person skilled in the art.

[0082] The genetic constructs of the invention may further include an origin of replication sequence that is required for maintenance and/or replication in a specific cell type. One example is when a genetic construct is required to be maintained in a bacterial cell as an episomal genetic element (e.g. plasmid or cosmid molecule). Preferred origins of replication include, but are not limited to, the f1-ori and colE1.

[0083] For the detection of the successful transfer of the nucleic acid sequences as used in the methods of the invention and/or selection of transgenic plants comprising these nucleic acids, it is advantageous to use marker genes (or reporter genes). Therefore, the genetic construct may optionally comprise a selectable marker gene. Selectable markers are described in more detail in the “definitions” section herein. The marker genes may be removed or excised from the transgenic cell once they are no longer needed. Techniques for marker removal are known in the art, useful techniques are described above in the definitions section.

### Regulatory Element/Control Sequence/Promoter

[0084] The terms “regulatory element”, “control sequence” and “promoter” are all used interchangeably herein and are to be taken in a broad context to refer to regulatory nucleic acid sequences capable of effecting expression of the sequences to which they are ligated. The term “promoter” typically refers to a nucleic acid control sequence located upstream from the transcriptional start of a gene and which is involved in recognising and binding of RNA polymerase and other proteins, thereby directing transcription of an operably linked nucleic acid. Encompassed by the aforementioned terms are transcriptional regulatory sequences derived from a classical eukaryotic genomic gene (including the TATA box which is required for accurate transcription initiation, with or without a CCAAT box sequence) and additional regulatory elements (i.e. upstream activating sequences, enhancers and silencers) which alter gene expression in response to developmental and/or external stimuli, or in a tissue-specific manner. Also included within the term is a transcriptional regulatory sequence of a classical prokaryotic gene, in which case it may include a−35 box sequence and/or −10 box transcriptional regulatory sequences. The term “regulatory element” also encompasses a synthetic fusion molecule or derivative that confers, activates or enhances expression of a nucleic acid molecule in a cell, tissue or organ.

[0085] A “plant promoter” comprises regulatory elements, which mediate the expression of a coding sequence segment in plant cells. Accordingly, a plant promoter need not be of plant origin, but may originate from viruses or micro-organisms, for example from viruses which attack plant cells. The “plant promoter” can also originate from a plant cell, e.g. from the plant which is transformed with the nucleic acid sequence to be expressed in the inventive process and described herein. This also applies to other “plant” regulatory signals, such as “plant” terminators. The promoters upstream of the nucleotide sequences useful in the methods of the present invention can be modified by one or more nucleotide substitution(s), insertion(s) and/or deletion(s) without interfering with the functionality or activity of either the promoters, the open reading frame (ORF) or the 3′-regulatory region such as terminators or other 3′ regulatory regions which are located away from the ORF. It is furthermore possible that the activity of the promoters is increased by modification of their sequence, or that they are replaced completely by more active promoters, even promoters from heterologous organisms. For expression in plants, the nucleic acid molecule must, as described above, be linked operably to or comprise a suitable promoter which expresses the gene at the right point in time and with the required spatial expression pattern.

[0086] For the identification of functionally equivalent promoters, the promoter strength and/or expression pattern of a candidate promoter may be analysed for example by operably linking the promoter to a reporter gene and assaying the expression level and pattern of the reporter gene in various tissues of the plant. Suitable well-known reporter genes include for example beta-glucuronidase or beta-galactosidase. The promoter activity is assayed by measuring the enzymatic activity of the beta-glucuronidase or beta-galactosidase. The promoter strength and/or expression pattern may then be compared to that of a reference promoter (such as the one used in the methods of the present invention). Alternatively, promoter strength may be assayed by quantifying mRNA levels or by comparing mRNA levels of the nucleic acid used in the methods of the present invention, with mRNA levels of housekeeping genes such as 18S rRNA, using methods known in the art, such as Northern blotting with densitometric analysis of autoradiograms, quantitative real-time PCR or RT-PCR (Heid et al., 1996 Genome Methods 6: 986-994). Generally by “weak promoter” is intended a promoter that drives expression of a coding sequence at a low level. By “low level” is intended at levels of about 1/10,000 transcripts to about 1/100,000 transcripts, to about 1/500,0000 transcripts per cell. Conversely, a “strong promoter” drives expression of a coding sequence at high level, or at about 1/10 transcripts to about 1/100 transcripts to about 1/1000 transcripts per cell. Generally, by “medium strength promoter” is intended a promoter that drives expression of a coding sequence at a lower level than a strong promoter, in particular at a level that is in all instances below that obtained when under the control of a 35S CaMV promoter.

### Operably Linked

[0087] The term “operably linked” as used herein refers to a functional linkage between the promoter sequence and the gene of interest, such that the promoter sequence is able to initiate transcription of the gene of interest.

### Constitutive Promoter

[0088] A “constitutive promoter” refers to a promoter that is transcriptionally active during most, but not necessarily all, phases of growth and development and under most environmental conditions, in at least one cell, tissue or organ. Table 2a below gives examples of constitutive promoters.

TABLE 2a
Examples of constitutive promoters

| Gene Source | Reference |
|---|---|
| Actin | McElroy et al, Plant Cell, 2: 163-171, 1990 |
| HMGP | WO 2004/070039 |
| CAMV 35S | Odell et al, Nature, 313: 810-812, 1985 |
| CaMV 19S | Nilsson et al., Physiol. Plant. 100: 456-462, 1997 |
| GOS2 | de Pater et al, Plant J Nov; 2(6): 837-44, 1992, |
| | WO 2004/065596 |
| Ubiquitin | Christensen et al, Plant Mol. Biol. 18: 675-689, 1992 |
| Rice cyclophilin | Buchholz et al, Plant Mol Biol. 25(5): 837-43, 1994 |
| Maize H3 histone | Lepetit et al, Mol. Gen. Genet. 231: 276-285, 1992 |
| Alfalfa H3 | Wu et al. Plant Mol. Biol. 11: 641-649, 1988 |
| histone | |
| Actin 2 | An et al, Plant J. 10(1); 107-121, 1996 |
| 34S FMV | Sanger et al., Plant. Mol. Biol., 14, 1990: 433-443 |
| Rubisco small | U.S. Pat. No. 4,962,028 |
| subunit | |
| OCS | Leisner (1988) Proc Natl Acad Sci USA 85(5): 2553 |
| SAD1 | Jain et al., Crop Science, 39 (6), 1999: 1696 |
| SAD2 | Jain et al., Crop Science, 39 (6), 1999: 1696 |
| nos | Shaw et al. (1984) Nucleic Acids Res. 12(20): |
| | 7831-7846 |
| V-ATPase | WO 01/14572 |
| Super promoter | WO 95/14098 |
| G-box proteins | WO 94/12015 |

### Ubiquitous Promoter

[0089] A ubiquitous promoter is active in substantially all tissues or cells of an organism.

### Developmentally-Regulated Promoter

[0090] A developmentally-regulated promoter is active during certain developmental stages or in parts of the plant that undergo developmental changes.

### Inducible Promoter

[0091] An inducible promoter has induced or increased transcription initiation in response to a chemical (for a review see Gatz 1997, Annu. Rev. Plant Physiol. Plant Mol. Biol., 48:89-108), environmental or physical stimulus, or may be “stress-inducible”, i.e. activated when a plant is exposed to various stress conditions, or a “pathogen-inducible” i.e. activated when a plant is exposed to exposure to various pathogens.

### Organ-Specific/Tissue-Specific Promoter

[0092] An organ-specific or tissue-specific promoter is one that is capable of preferentially initiating transcription in certain organs or tissues, such as the leaves, roots, seed tissue etc. For example, a “root-specific promoter” is a promoter that is transcriptionally active predominantly in plant roots, substantially to the exclusion of any other parts of a plant, whilst still allowing for any leaky expression in these other plant parts. Promoters able to initiate transcription in certain cells only are referred to herein as “cell-specific”.

[0093] Examples of root-specific promoters are listed in Table 2b below:

TABLE 2b
Examples of root-specific promoters

| Gene Source | Reference |
|---|---|
| RCc3 | Plant Mol Biol. 1995 January; 27(2): 237-48 |
| Arabidopsis PHT1 | Kovama et al., 2005; Mudge et al. (2002, |
| | Plant J. 31: 341) |
| Medicago phosphate | Xiao et al., 2006 |
| transporter | |
| Arabidopsis Pyk10 | Nitz et al. (2001) Plant Sci 161(2): 337-346 |
| root-expressible genes | Tingey et al., EMBO J. 6: 1, 1987. |
| tobacco auxin- | Van der Zaal et al., Plant Mol. Biol. 16, |
| inducible gene | 983, 1991. |
| β-tubulin | Oppenheimer, et al., Gene 63: 87, 1988. |
| tobacco root- | Conkling, et al., Plant Physiol. 93: 1203, 1990. |
| specific genes | |
| B. napus G1-3b gene | U.S. Pat. No. 5,401,836 |
| SbPRP1 | Suzuki et al., Plant Mol. Biol. 21: 109-119, |
| | 1993. |
| LRX1 | Baumberger et al. 2001, Genes & Dev. 15: 1128 |
| BTG-26 Brassica | US 20050044585 |
| napus | |
| LeAMT1 (tomato) | Lauter et al. (1996, PNAS 3: 8139) |
| The LeNRT1-1 | Lauter et al. (1996, PNAS 3: 8139) |
| (tomato) | |
| class I patatin | Liu et al., Plant Mol. Biol. 153: 386-395, 1991. |
| gene (potato) | |
| KDC1 (Daucus | Downey et al. (2000, J. Biol. Chem. 275: 39420) |
| carota) | |
| TobRB7 gene | W Song (1997) PhD Thesis, North Carolina State |
| | University, Raleigh, NC USA |
| OsRAB5a (rice) | Wang et al. 2002, Plant Sci. 163: 273 |
| ALF5 (Arabidopsis) | Diener et al. (2001, Plant Cell 13: 1625) |
| NRT2; 1Np (N. | Quesada et al. (1997, Plant Mol. Biol. 34: 265) |
| plumbaginifolia) | |

[0094] A seed-specific promoter is transcriptionally active predominantly in seed tissue, but not necessarily exclusively in seed tissue (in cases of leaky expression). The seed-specific promoter may be active during seed development and/or during germination. The seed specific promoter may be endosperm/aleurone/embryo specific. Examples of seed-specific promoters (endosperm/aleurone/embryo specific) are shown in Table 2c to Table 2f below.

[0095] Further examples of seed-specific promoters are given in Qing Qu and Takaiwa (Plant Biotechnol. J. 2, 113-125, 2004), which disclosure is incorporated by reference herein as if fully set forth.

TABLE 2c
Examples of seed-specific promoters

| Gene source | Reference |
|---|---|
| seed-specific genes | Simon et al., Plant Mol. Biol. 5: 191, 1985; |
| | Scofield et al., J. Biol. Chem. 262: 12202, 1987.; |
| | Baszczynski et al., Plant Mol. Biol. 14: 633, 1990. |
| Brazil Nut albumin | Pearson et al., Plant Mol. Biol. 18: 235-245, 1992. |
| legumin | Ellis et al., Plant Mol. Biol. 10: 203-214, 1988. |
| glutelin (rice) | Takaiwa et al., Mol. Gen. Genet. 208: 15-22, 1986; |
| | Takaiwa et al., FEBS Letts. 221: 43-47, 1987. |
| zein | Matzke et al Plant Mol Biol, 14(3): 323-32 1990 |
| napA | Stalberg et al, Planta 199: 515-519, 1996. |
| wheat LMW and HMW | Mol Gen Genet 216: 81-90, 1989; NAR 17: 461-2, 1989 |
| glutenin-1 | |
| wheat SPA | Albani et al, Plant Cell, 9: 171-184, 1997 |
| wheat α, β, γ-gliadins | EMBO J. 3: 1409-15, 1984 |
| barley Itr1 promoter | Diaz et al. (1995) Mol Gen Genet 248(5): 592-8 |
| barley B1, C, D, hordein | Theor Appl Gen 98: 1253-62, 1999; Plant J 4: 343-55, |
| | 1993; Mol Gen Genet 250: 750-60, 1996 |
| barley DOF | Mena et al, The Plant Journal, 116(1): 53-62, 1998 |
| blz2 | EP99106056.7 |
| synthetic promoter | Vicente-Carbajosa et al., Plant J. 13: 629-640, 1998. |
| rice prolamin NRP33 | Wu et al, Plant Cell Physiology 39(8) 885-889, 1998 |
| rice a-globulin Glb-1 | Wu et al, Plant Cell Physiology 39(8) 885-889, 1998 |
| rice OSH1 | Sato et al, Proc. Natl. Acad. Sci. USA, 93: 8117-8122, |
| | 1996 |
| rice α-globulin REB/OHP-1 | Nakase et al. Plant Mol. Biol. 33: 513-522, 1997 |
| rice ADP-glucose pyrophos- | Trans Res 6: 157-68, 1997 |
| phorylase | |
| maize ESR gene family | Plant J 12: 235-46, 1997 |
| sorghum α-kafirin | DeRose et al., Plant Mol. Biol 32: 1029-35, 1996 |
| KNOX | Postma-Haarsma et al, Plant Mol. Biol. 39: 257-71, 1999 |
| rice oleosin | Wu et al, J. Biochem. 123: 386, 1998 |
| sunflower oleosin | Cummins et al., Plant Mol. Biol. 19: 873-876, 1992 |
| PRO0117, putative rice 40S | WO 2004/070039 |
| ribosomal protein | |
| PRO0136, rice alanine | unpublished |
| aminotransferase | |
| PRO0147, trypsin inhibitor | unpublished |
| ITR1 (barley) | |
| PRO0151, rice WSI18 | WO 2004/070039 |
| PRO0175, rice RAB21 | WO 2004/070039 |
| PRO005 | WO 2004/070039 |
| PRO0095 | WO 2004/070039 |
| α-amylase (Amy32b) | Lanahan et al, Plant Cell 4: 203-211, 1992; Skriver et al, |
| | Proc Natl Acad Sci USA 88: 7266-7270, 1991 |
| cathepsin β-like gene | Cejudo et al, Plant Mol Biol 20: 849-856, 1992 |
| Barley Ltp2 | Kalla et al., Plant J. 6: 849-60, 1994 |
| Chi26 | Leah et al., Plant J. 4: 579-89, 1994 |
| Maize B-Peru | Selinger et al., Genetics 149; 1125-38, 1998 |

TABLE 2d
examples of endosperm-specific promoters

| Gene source | Reference |
|---|---|
| glutelin (rice) | Takaiwa et al. (1986) Mol Gen Genet 208: 15-22; |
| | Takaiwa et al. (1987) FEBS Letts. 221: 43-47 |
| zein | Matzke et al., (1990) Plant Mol Biol 14(3): 323-32 |
| wheat LMW | Colot et al. (1989) Mol Gen Genet 216: 81-90, |
| and HMW | Anderson et al. (1989) NAR 17: 461-2 |
| glutenin-1 | |
| wheat SPA | Albani et al. (1997) Plant Cell 9: 171-184 |
| wheat gliadins | Rafalski et al. (1984) EMBO 3: 1409-15 |
| barley Itr1 | Diaz et al. (1995) Mol Gen Genet 248(5): 592-8 |
| promoter | |
| barley B1, C, D, | Cho et al. (1999) Theor Appl Genet 98: 1253-62; |
| hordein | Muller et al. (1993) Plant J 4: 343-55; |
| | Sorenson et al. (1996) Mol Gen Genet 250: 750-60 |
| barley DOF | Mena et al, (1998) Plant J 116(1): 53-62 |
| blz2 | Onate et al. (1999) J Biol Chem 274(14): 9175-82 |
| synthetic promoter | Vicente-Carbajosa et al. (1998) Plant J 13: 629-640 |
| rice prolamin | Wu et al, (1998) Plant Cell Physiol 39(8) 885-889 |
| NRP33 | |
| rice globulin | Wu et al. (1998) Plant Cell Physiol 39(8) 885-889 |
| Glb-1 | |
| rice globulin | Nakase et al. (1997) Plant Molec Biol 33: 513-522 |
| REB/OHP-1 | |
| rice ADP-glucose | Russell et al. (1997) Trans Res 6: 157-68 |
| pyrophosphorylase | |
| maize ESR | Opsahl-Ferstad et al. (1997) Plant J 12: 235-46 |
| gene family | |
| sorghum kafirin | DeRose et al. (1996) Plant Mol Biol 32: 1029-35 |

TABLE 2e
Examples of embryo specific promoters:

| Gene source | Reference |
|---|---|
| rice OSH1 | Sato et al, Proc. Natl. Acad. Sci. USA, 93: 8117-8122, |
| | 1996 |
| KNOX | Postma-Haarsma et al, Plant Mol. Biol. 39: 257-71, 1999 |
| PRO0151 | WO 2004/070039 |
| PRO0175 | WO 2004/070039 |
| PRO005 | WO 2004/070039 |
| PRO0095 | WO 2004/070039 |

TABLE 2f
Examples of aleurone-specific promoters:

| Gene source | Reference |
|---|---|
| α-amylase | Lanahan et al, Plant Cell 4: 203-211, 1992; |
| (Amy32b) | Skriver et al, Proc Natl Acad Sci USA 88: |
| | 7266-7270, 1991 |
| cathepsin β-like gene | Cejudo et al, Plant Mol Biol 20: 849-856, 1992 |
| Barley Ltp2 | Kalla et al., Plant J. 6: 849-60, 1994 |
| Chi26 | Leah et al., Plant J. 4: 579-89, 1994 |
| Maize B-Peru | Selinger et al., Genetics 149; 1125-38, 1998 |

[0096] A green tissue-specific promoter as defined herein is a promoter that is transcriptionally active predominantly in green tissue, substantially to the exclusion of any other parts of a plant, whilst still allowing for any leaky expression in these other plant parts.

[0097] Examples of green tissue-specific promoters which may be used to perform the methods of the invention are shown in Table 2g below.

TABLE 2g
Examples of green tissue-specific promoters

| Gene | Expression | Reference |
|---|---|---|
| Maize Orthophosphate dikinase | Leaf specific | Fukavama et al., 2001 |
| Maize Phosphoenolpyruvate | Leaf specific | Kausch et al., 2001 |
| carboxylase | | |
| Rice Phosphoenolpyruvate | Leaf specific | Liu et al., 2003 |
| carboxylase | | |
| Rice small subunit Rubisco | Leaf specific | Nomura et al., 2000 |
| rice beta expansin EXBP9 | Shoot specific | WO 2004/070039 |
| Pigeonpea small subunit Rubisco | Leaf specific | Panguluri et al., 2005 |
| Pea RBCS3A | Leaf specific | |

[0098] Another example of a tissue-specific promoter is a meristem-specific promoter, which is transcriptionally active predominantly in meristematic tissue, substantially to the exclusion of any other parts of a plant, whilst still allowing for any leaky expression in these other plant parts. Examples of green meristem-specific promoters which may be used to perform the methods of the invention are shown in Table 2h below.

TABLE 2h
Examples of meristem-specific promoters

| Gene source | Expression pattern | Reference |
|---|---|---|
| rice OSH1 | Shoot apical meristem, | Sato et al. (1996) |
| | from embryo globular | Proc. Natl. Acad. Sci. |
| | stage to seedling stage | USA, 93: 8117-8122 |
| Rice metallothionein | Meristem specific | BAD87835.1 |
| WAK1 & WAK 2 | Shoot and root apical | Wagner & Kohorn |
| | meristems, and in ex- | (2001) Plant Cell |
| | panding leaves and sepals | 13(2): 303-318 |

### Terminator

[0099] The term “terminator” encompasses a control sequence which is a DNA sequence at the end of a transcriptional unit which signals 3′ processing and polyadenylation of a primary transcript and termination of transcription. The terminator can be derived from the natural gene, from a variety of other plant genes, or from T-DNA. The terminator to be added may be derived from, for example, the nopaline synthase or octopine synthase genes, or alternatively from another plant gene, or less preferably from any other eukaryotic gene.

### Selectable Marker (Gene)/Reporter Gene

[0100] “Selectable marker”, “selectable marker gene” or “reporter gene” includes any gene that confers a phenotype on a cell in which it is expressed to facilitate the identification and/or selection of cells that are transfected or transformed with a nucleic acid construct of the invention. These marker genes enable the identification of a successful transfer of the nucleic acid molecules via a series of different principles. Suitable markers may be selected from markers that confer antibiotic or herbicide resistance, that introduce a new metabolic trait or that allow visual selection. Examples of selectable marker genes include genes conferring resistance to antibiotics (such as nptII that phosphorylates neomycin and kanamycin, or hpt, phosphorylating hygromycin, or genes conferring resistance to, for example, bleomycin, streptomycin, tetracyclin, chloramphenicol, ampicillin, gentamycin, geneticin (G418), spectinomycin or blasticidin), to herbicides (for example bar which provides resistance to Basta®; aroA or gox providing resistance against glyphosate, or the genes conferring resistance to, for example, imidazolinone, phosphinothricin or sulfonylurea), or genes that provide a metabolic trait (such as manA that allows plants to use mannose as sole carbon source or xylose isomerase for the utilisation of xylose, or antinutritive markers such as the resistance to 2-deoxyglucose). Expression of visual marker genes results in the formation of colour (for example β-glucuronidase, GUS or β-galactosidase with its coloured substrates, for example X-Gal), luminescence (such as the luciferin/luceferase system) or fluorescence (Green Fluorescent Protein, GFP, and derivatives thereof). This list represents only a small number of possible markers. The skilled worker is familiar with such markers. Different markers are preferred, depending on the organism and the selection method.

[0101] It is known that upon stable or transient integration of nucleic acids into plant cells, only a minority of the cells takes up the foreign DNA and, if desired, integrates it into its genome, depending on the expression vector used and the transfection technique used. To identify and select these integrants, a gene coding for a selectable marker (such as the ones described above) is usually introduced into the host cells together with the gene of interest. These markers can for example be used in mutants in which these genes are not functional by, for example, deletion by conventional methods. Furthermore, nucleic acid molecules encoding a selectable marker can be introduced into a host cell on the same vector that comprises the sequence encoding the polypeptides of the invention or used in the methods of the invention, or else in a separate vector. Cells which have been stably transfected with the introduced nucleic acid can be identified for example by selection (for example, cells which have integrated the selectable marker survive whereas the other cells die).

[0102] Since the marker genes, particularly genes for resistance to antibiotics and herbicides, are no longer required or are undesired in the transgenic host cell once the nucleic acids have been introduced successfully, the process according to the invention for introducing the nucleic acids advantageously employs techniques which enable the removal or excision of these marker genes. One such a method is what is known as co-transformation. The co-transformation method employs two vectors simultaneously for the transformation, one vector bearing the nucleic acid according to the invention and a second bearing the marker gene(s). A large proportion of transformants receives or, in the case of plants, comprises (up to 40% or more of the transformants), both vectors. In case of transformation with Agrobacteria, the transformants usually receive only a part of the vector, i.e. the sequence flanked by the T-DNA, which usually represents the expression cassette. The marker genes can subsequently be removed from the transformed plant by performing crosses. In another method, marker genes integrated into a transposon are used for the transformation together with desired nucleic acid (known as the Ac/Ds technology). The transformants can be crossed with a transposase source or the transformants are transformed with a nucleic acid construct conferring expression of a transposase, transiently or stable. In some cases (approx. 10%), the transposon jumps out of the genome of the host cell once transformation has taken place successfully and is lost. In a further number of cases, the transposon jumps to a different location. In these cases the marker gene must be eliminated by performing crosses. In microbiology, techniques were developed which make possible, or facilitate, the detection of such events. A further advantageous method relies on what is known as recombination systems; whose advantage is that elimination by crossing can be dispensed with. The best-known system of this type is what is known as the Cre/lox system. Cre1 is a recombinase that removes the sequences located between the IoxP sequences. If the marker gene is integrated between the loxP sequences, it is removed once transformation has taken place successfully, by expression of the recombinase. Further recombination systems are the HIN/HIX, FLP/FRT and REP/STB system (Tribble et al., J. Biol. Chem., 275, 2000: 22255-22267; Velmurugan et al., J. Cell Biol., 149, 2000: 553-566). A site-specific integration into the plant genome of the nucleic acid sequences according to the invention is possible. Naturally, these methods can also be applied to microorganisms such as yeast, fungi or bacteria.

### Transgenic/Transgene/Recombinant

[0103] For the purposes of the invention, “transgenic”, “transgene” or “recombinant” means with regard to, for example, a nucleic acid sequence, an expression cassette, gene construct or a vector comprising the nucleic acid sequence or an organism transformed with the nucleic acid sequences, expression cassettes or vectors according to the invention, all those constructions brought about by recombinant methods in which either
[0104] (a) the nucleic acid sequences encoding proteins useful in the methods of the invention, or
[0105] (b) genetic control sequence(s) which is operably linked with the nucleic acid sequence according to the invention, for example a promoter, or
[0106] (c) a) and b)
   are not located in their natural genetic environment or have been modified by recombinant methods, it being possible for the modification to take the form of, for example, a substitution, addition, deletion, inversion or insertion of one or more nucleotide residues. The natural genetic environment is understood as meaning the natural genomic or chromosomal locus in the original plant or the presence in a genomic library. In the case of a genomic library, the natural genetic environment of the nucleic acid sequence is preferably retained, at least in part. The environment flanks the nucleic acid sequence at least on one side and has a sequence length of at least 50 bp, preferably at least 500 bp, especially preferably at least 1000 bp, most preferably at least 5000 bp. A naturally occurring expression cassette—for example the naturally occurring combination of the natural promoter of the nucleic acid sequences with the corresponding nucleic acid sequence encoding a polypeptide useful in the methods of the present invention, as defined above—becomes a transgenic expression cassette when this expression cassette is modified by non-natural, synthetic (“artificial”) methods such as, for example, mutagenic treatment. Suitable methods are described, for example, in U.S. Pat. No. 5,565,350 or WO 00/15815.

[0107] A transgenic plant for the purposes of the invention is thus understood as meaning, as above, that the nucleic acids used in the method of the invention are not at their natural locus in the genome of said plant, it being possible for the nucleic acids to be expressed homologously or heterologously. However, as mentioned, transgenic also means that, while the nucleic acids according to the invention or used in the inventive method are at their natural position in the genome of a plant, the sequence has been modified with regard to the natural sequence, and/or that the regulatory sequences of the natural sequences have been modified. Transgenic is preferably understood as meaning the expression of the nucleic acids according to the invention at an unnatural locus in the genome, i.e. homologous or, preferably, heterologous expression of the nucleic acids takes place. Preferred transgenic plants are mentioned herein.

### Modulation

[0108] The term “modulation” means in relation to expression or gene expression, a process in which the expression level is changed by said gene expression in comparison to the control plant, the expression level may be increased or decreased. The original, unmodulated expression may be of any kind of expression of a structural RNA (rRNA, tRNA) or mRNA with subsequent translation. The term “modulating the activity” shall mean any change of the expression of the inventive nucleic acid sequences or encoded proteins, which leads to increased yield and/or increased growth of the plants.

### Expression

[0109] The term “expression” or “gene expression” means the transcription of a specific gene or specific genes or specific genetic construct. The term “expression” or “gene expression” in particular means the transcription of a gene or genes or genetic construct into structural RNA (rRNA, tRNA) or mRNA with or without subsequent translation of the latter into a protein. The process includes transcription of DNA and processing of the resulting mRNA product.

### Increased Expression/Overexpression

[0110] The term “increased expression” or “overexpression” as used herein means any form of expression that is additional to the original wild-type expression level.

[0111] Methods for increasing expression of genes or gene products are well documented in the art and include, for example, overexpression driven by appropriate promoters, the use of transcription enhancers or translation enhancers. Isolated nucleic acids which serve as promoter or enhancer elements may be introduced in an appropriate position (typically upstream) of a non-heterologous form of a polynucleotide so as to upregulate expression of a nucleic acid encoding the polypeptide of interest. For example, endogenous promoters may be altered in vivo by mutation, deletion, and/or substitution (see, Kmiec, U.S. Pat. No. 5,565,350; Zarling et al., WO9322443), or isolated promoters may be introduced into a plant cell in the proper orientation and distance from a gene of the present invention so as to control the expression of the gene.

[0112] If polypeptide expression is desired, it is generally desirable to include a polyadenylation region at the 3′-end of a polynucleotide coding region. The polyadenylation region can be derived from the natural gene, from a variety of other plant genes, or from T-DNA. The 3′ end sequence to be added may be derived from, for example, the nopaline synthase or octopine synthase genes, or alternatively from another plant gene, or less preferably from any other eukaryotic gene.

[0113] An intron sequence may also be added to the 5′ untranslated region (UTR) or the coding sequence of the partial coding sequence to increase the amount of the mature message that accumulates in the cytosol. Inclusion of a spliceable intron in the transcription unit in both plant and animal expression constructs has been shown to increase gene expression at both the mRNA and protein levels up to 1000-fold (Buchman and Berg (1988) Mol. Cell. biol. 8: 4395-4405; Callis et al. (1987) Genes Dev 1:1183-1200). Such intron enhancement of gene expression is typically greatest when placed near the 5′ end of the transcription unit. Use of the maize introns Adh1-S intron 1, 2, and 6, the Bronze-1 intron are known in the art. For general information see: The Maize Handbook, Chapter 116, Freeling and Walbot, Eds., Springer, N.Y. (1994).

### Decreased Expression

[0114] Reference herein to “decreased expression” or “reduction or substantial elimination” of expression is taken to mean a decrease in endogenous gene expression and/or polypeptide levels and/or polypeptide activity relative to control plants. The reduction or substantial elimination is in increasing order of preference at least 10%, 20%, 30%, 40% or 50%, 60%, 70%, 80%, 85%, 90%, or 95%, 96%, 97%, 98%, 99% or more reduced compared to that of control plants.

[0115] For the reduction or substantial elimination of expression an endogenous gene in a plant, a sufficient length of substantially contiguous nucleotides of a nucleic acid sequence is required. In order to perform gene silencing, this may be as little as 20, 19, 18, 17, 16, 15, 14, 13, 12, 11, 10 or fewer nucleotides, alternatively this may be as much as the entire gene (including the 5′ and/or 3′ UTR, either in part or in whole). The stretch of substantially contiguous nucleotides may be derived from the nucleic acid encoding the protein of interest (target gene), or from any nucleic acid capable of encoding an orthologue, paralogue or homologue of the protein of interest. Preferably, the stretch of substantially contiguous nucleotides is capable of forming hydrogen bonds with the target gene (either sense or antisense strand), more preferably, the stretch of substantially contiguous nucleotides has, in increasing order of preference, 50%, 60%, 70%, 80%, 85%, 90%, 95%, 96%, 97%, 98%, 99%, 100% sequence identity to the target gene (either sense or antisense strand). A nucleic acid sequence encoding a (functional) polypeptide is not a requirement for the various methods discussed herein for the reduction or substantial elimination of expression of an endogenous gene.

[0116] This reduction or substantial elimination of expression may be achieved using routine tools and techniques. A preferred method for the reduction or substantial elimination of endogenous gene expression is by introducing and expressing in a plant a genetic construct into which the nucleic acid (in this case a stretch of substantially contiguous nucleotides derived from the gene of interest, or from any nucleic acid capable of encoding an orthologue, paralogue or homologue of any one of the protein of interest) is cloned as an inverted repeat (in part or completely), separated by a spacer (non-coding DNA).

[0117] In such a preferred method, expression of the endogenous gene is reduced or substantially eliminated through RNA-mediated silencing using an inverted repeat of a nucleic acid or a part thereof (in this case a stretch of substantially contiguous nucleotides derived from the gene of interest, or from any nucleic acid capable of encoding an orthologue, paralogue or homologue of the protein of interest), preferably capable of forming a hairpin structure. The inverted repeat is cloned in an expression vector comprising control sequences. A non-coding DNA nucleic acid sequence (a spacer, for example a matrix attachment region fragment (MAR), an intron, a polylinker, etc.) is located between the two inverted nucleic acids forming the inverted repeat. After transcription of the inverted repeat, a chimeric RNA with a self-complementary structure is formed (partial or complete). This double-stranded RNA structure is referred to as the hairpin RNA (hpRNA). The hpRNA is processed by the plant into siRNAs that are incorporated into an RNA-induced silencing complex (RISC). The RISC further cleaves the mRNA transcripts, thereby substantially reducing the number of mRNA transcripts to be translated into polypeptides. For further general details see for example, Grierson et al. (1998) WO 98/53083; Waterhouse et al. (1999) WO 99/53050).

[0118] Performance of the methods of the invention does not rely on introducing and expressing in a plant a genetic construct into which the nucleic acid is cloned as an inverted repeat, but any one or more of several well-known “gene silencing” methods may be used to achieve the same effects.

[0119] One such method for the reduction of endogenous gene expression is RNA-mediated silencing of gene expression (downregulation). Silencing in this case is triggered in a plant by a double stranded RNA sequence (dsRNA) that is substantially similar to the target endogenous gene. This dsRNA is further processed by the plant into about 20 to about 26 nucleotides called short interfering RNAs (siRNAs). The siRNAs are incorporated into an RNA-induced silencing complex (RISC) that cleaves the mRNA transcript of the endogenous target gene, thereby substantially reducing the number of mRNA transcripts to be translated into a polypeptide. Preferably, the double stranded RNA sequence corresponds to a target gene.

[0120] Another example of an RNA silencing method involves the introduction of nucleic acid sequences or parts thereof (in this case a stretch of substantially contiguous nucleotides derived from the gene of interest, or from any nucleic acid capable of encoding an orthologue, paralogue or homologue of the protein of interest) in a sense orientation into a plant. “Sense orientation” refers to a DNA sequence that is homologous to an mRNA transcript thereof. Introduced into a plant would therefore be at least one copy of the nucleic acid sequence. The additional nucleic acid sequence will reduce expression of the endogenous gene, giving rise to a phenomenon known as co-suppression. The reduction of gene expression will be more pronounced if several additional copies of a nucleic acid sequence are introduced into the plant, as there is a positive correlation between high transcript levels and the triggering of co-suppression.

[0121] Another example of an RNA silencing method involves the use of antisense nucleic acid sequences. An “antisense” nucleic acid sequence comprises a nucleotide sequence that is complementary to a “sense” nucleic acid sequence encoding a protein, i.e. complementary to the coding strand of a double-stranded cDNA molecule or complementary to an mRNA transcript sequence. The antisense nucleic acid sequence is preferably complementary to the endogenous gene to be silenced. The complementarity may be located in the “coding region” and/or in the “non-coding region” of a gene. The term “coding region” refers to a region of the nucleotide sequence comprising codons that are translated into amino acid residues. The term “non-coding region” refers to 5′ and 3′ sequences that flank the coding region that are transcribed but not translated into amino acids (also referred to as 5′ and 3′ untranslated regions).

[0122] Antisense nucleic acid sequences can be designed according to the rules of Watson and Crick base pairing. The antisense nucleic acid sequence may be complementary to the entire nucleic acid sequence (in this case a stretch of substantially contiguous nucleotides derived from the gene of interest, or from any nucleic acid capable of encoding an orthologue, paralogue or homologue of the protein of interest), but may also be an oligonucleotide that is antisense to only a part of the nucleic acid sequence (including the mRNA 5′ and 3′ UTR). For example, the antisense oligonucleotide sequence may be complementary to the region surrounding the translation start site of an mRNA transcript encoding a polypeptide. The length of a suitable antisense oligonucleotide sequence is known in the art and may start from about 50, 45, 40, 35, 30, 25, 20, 15 or 10 nucleotides in length or less. An antisense nucleic acid sequence according to the invention may be constructed using chemical synthesis and enzymatic ligation reactions using methods known in the art. For example, an antisense nucleic acid sequence (e.g., an antisense oligonucleotide sequence) may be chemically synthesized using naturally occurring nucleotides or variously modified nucleotides designed to increase the biological stability of the molecules or to increase the physical stability of the duplex formed between the antisense and sense nucleic acid sequences, e.g., phosphorothioate derivatives and acridine substituted nucleotides may be used. Examples of modified nucleotides that may be used to generate the antisense nucleic acid sequences are well known in the art. Known nucleotide modifications include methylation, cyclization and ‘caps’ and substitution of one or more of the naturally occurring nucleotides with an analogue such as inosine. Other modifications of nucleotides are well known in the art.

[0123] The antisense nucleic acid sequence can be produced biologically using an expression vector into which a nucleic acid sequence has been subcloned in an antisense orientation (i.e., RNA transcribed from the inserted nucleic acid will be of an antisense orientation to a target nucleic acid of interest). Preferably, production of antisense nucleic acid sequences in plants occurs by means of a stably integrated nucleic acid construct comprising a promoter, an operably linked antisense oligonucleotide, and a terminator.

[0124] The nucleic acid molecules used for silencing in the methods of the invention (whether introduced into a plant or generated in situ) hybridize with or bind to mRNA transcripts and/or genomic DNA encoding a polypeptide to thereby inhibit expression of the protein, e.g., by inhibiting transcription and/or translation. The hybridization can be by conventional nucleotide complementarity to form a stable duplex, or, for example, in the case of an antisense nucleic acid sequence which binds to DNA duplexes, through specific interactions in the major groove of the double helix. Antisense nucleic acid sequences may be introduced into a plant by transformation or direct injection at a specific tissue site. Alternatively, antisense nucleic acid sequences can be modified to target selected cells and then administered systemically. For example, for systemic administration, antisense nucleic acid sequences can be modified such that they specifically bind to receptors or antigens expressed on a selected cell surface, e.g., by linking the antisense nucleic acid sequence to peptides or antibodies which bind to cell surface receptors or antigens. The antisense nucleic acid sequences can also be delivered to cells using the vectors described herein.

[0125] According to a further aspect, the antisense nucleic acid sequence is an a-anomeric nucleic acid sequence. An a-anomeric nucleic acid sequence forms specific double-stranded hybrids with complementary RNA in which, contrary to the usual b-units, the strands run parallel to each other (Gaultier et al. (1987) Nucl Ac Res 15: 6625-6641). The antisense nucleic acid sequence may also comprise a 2′-o-methylribonucleotide (Inoue et al. (1987) Nucl Ac Res 15, 6131-6148) or a chimeric RNA-DNA analogue (Inoue et al. (1987) FEBS Lett. 215, 327-330).

[0126] The reduction or substantial elimination of endogenous gene expression may also be performed using ribozymes. Ribozymes are catalytic RNA molecules with ribonuclease activity that are capable of cleaving a single-stranded nucleic acid sequence, such as an mRNA, to which they have a complementary region. Thus, ribozymes (e.g., hammerhead ribozymes (described in Haselhoff and Gerlach (1988) Nature 334, 585-591) can be used to catalytically cleave mRNA transcripts encoding a polypeptide, thereby substantially reducing the number of mRNA transcripts to be translated into a polypeptide. A ribozyme having specificity for a nucleic acid sequence can be designed (see for example: Cech et al. U.S. Pat. No. 4,987,071; and Cech et al. U.S. Pat. No. 5,116,742). Alternatively, mRNA transcripts corresponding to a nucleic acid sequence can be used to select a catalytic RNA having a specific ribonuclease activity from a pool of RNA molecules (Bartel and Szostak (1993) Science 261, 1411-1418). The use of ribozymes for gene silencing in plants is known in the art (e.g., Atkins et al. (1994) WO 94/00012; Lenne et al. (1995) WO 95/03404; Lutziger et al. (2000) WO 00/00619; Prinsen et al. (1997) WO 97/13865 and Scott et al. (1997) WO 97/38116).

[0127] Gene silencing may also be achieved by insertion mutagenesis (for example, T-DNA insertion or transposon insertion) or by strategies as described by, among others, Angell and Baulcombe ((1999) Plant J 20(3): 357-62), (Amplicon VIGS WO 98/36083), or Baulcombe (WO 99/15682).

[0128] Gene silencing may also occur if there is a mutation on an endogenous gene and/or a mutation on an isolated gene/nucleic acid subsequently introduced into a plant. The reduction or substantial elimination may be caused by a non-functional polypeptide. For example, the polypeptide may bind to various interacting proteins; one or more mutation(s) and/or truncation(s) may therefore provide for a polypeptide that is still able to bind interacting proteins (such as receptor proteins) but that cannot exhibit its normal function (such as signalling ligand).

[0129] A further approach to gene silencing is by targeting nucleic acid sequences complementary to the regulatory region of the gene (e.g., the promoter and/or enhancers) to form triple helical structures that prevent transcription of the gene in target cells. See Helene, C., Anticancer Drug Res. 6, 569-84, 1991; Helene et al., Ann. N.Y. Acad. Sci. 660, 27-36 1992; and Maher, L. J. Bioassays 14, 807-15, 1992.

[0130] Other methods, such as the use of antibodies directed to an endogenous polypeptide for inhibiting its function in planta, or interference in the signalling pathway in which a polypeptide is involved, will be well known to the skilled man. In particular, it can be envisaged that manmade molecules may be useful for inhibiting the biological function of a target polypeptide, or for interfering with the signalling pathway in which the target polypeptide is involved.

[0131] Alternatively, a screening program may be set up to identify in a plant population natural variants of a gene, which variants encode polypeptides with reduced activity. Such natural variants may also be used for example, to perform homologous recombination.

[0132] Artificial and/or natural microRNAs (miRNAs) may be used to knock out gene expression and/or mRNA translation. Endogenous miRNAs are single stranded small RNAs of typically 19-24 nucleotides long. They function primarily to regulate gene expression and/or mRNA translation. Most plant microRNAs (miRNAs) have perfect or near-perfect complementarity with their target sequences. However, there are natural targets with up to five mismatches. They are processed from longer non-coding RNAs with characteristic fold-back structures by double-strand specific RNases of the Dicer family. Upon processing, they are incorporated in the RNA-induced silencing complex (RISC) by binding to its main component, an Argonauts protein. MiRNAs serve as the specificity components of RISC, since they base-pair to target nucleic acids, mostly mRNAs, in the cytoplasm. Subsequent regulatory events include target mRNA cleavage and destruction and/or translational inhibition. Effects of miRNA overexpression are thus often reflected in decreased mRNA levels of target genes.

[0133] Artificial microRNAs (amiRNAs), which are typically 21 nucleotides in length, can be genetically engineered specifically to negatively regulate gene expression of single or multiple genes of interest. Determinants of plant microRNA target selection are well known in the art. Empirical parameters for target recognition have been defined and can be used to aid in the design of specific amiRNAs, (Schwab et al., Dev. Cell 8, 517-527, 2005). Convenient tools for design and generation of amiRNAs and their precursors are also available to the public (Schwab et al., Plant Cell 18, 1121-1133, 2006).

[0134] For optimal performance, the gene silencing techniques used for reducing expression in a plant of an endogenous gene requires the use of nucleic acid sequences from monocotyledonous plants for transformation of monocotyledonous plants, and from dicotyledonous plants for transformation of dicotyledonous plants. Preferably, a nucleic acid sequence from any given plant species is introduced into that same species. For example, a nucleic acid sequence from rice is transformed into a rice plant. However, it is not an absolute requirement that the nucleic acid sequence to be introduced originates from the same plant species as the plant in which it will be introduced. It is sufficient that there is substantial homology between the endogenous target gene and the nucleic acid to be introduced.

[0135] Described above are examples of various methods for the reduction or substantial elimination of expression in a plant of an endogenous gene. A person skilled in the art would readily be able to adapt the aforementioned methods for silencing so as to achieve reduction of expression of an endogenous gene in a whole plant or in parts thereof through the use of an appropriate promoter, for example.

### Transformation

[0136] The term “introduction” or “transformation” as referred to herein encompasses the transfer of an exogenous polynucleotide into a host cell, irrespective of the method used for transfer. Plant tissue capable of subsequent clonal propagation, whether by organogenesis or embryogenesis, may be transformed with a genetic construct of the present invention and a whole plant regenerated there from. The particular tissue chosen will vary depending on the clonal propagation systems available for, and best suited to, the particular species being transformed. Exemplary tissue targets include leaf disks, pollen, embryos, cotyledons, hypocotyls, megagametophytes, callus tissue, existing meristematic tissue (e.g., apical meristem, axillary buds, and root meristems), and induced meristem tissue (e.g., cotyledon meristem and hypocotyl meristem). The polynucleotide may be transiently or stably introduced into a host cell and may be maintained non-integrated, for example, as a plasmid. Alternatively, it may be integrated into the host genome. The resulting transformed plant cell may then be used to regenerate a transformed plant in a manner known to persons skilled in the art.

[0137] The transfer of foreign genes into the genome of a plant is called transformation. Transformation of plant species is now a fairly routine technique. Advantageously, any of several transformation methods may be used to introduce the gene of interest into a suitable ancestor cell. The methods described for the transformation and regeneration of plants from plant tissues or plant cells may be utilized for transient or for stable transformation. Transformation methods include the use of liposomes, electroporation, chemicals that increase free DNA uptake, injection of the DNA directly into the plant, particle gun bombardment, transformation using viruses or pollen and microprojection. Methods may be selected from the calcium/polyethylene glycol method for protoplasts (Krens, F. A. et al., (1982) Nature 296, 72-74; Negrutiu I at al. (1987) Plant Mol Biol 8: 363-373); electroporation of protoplasts (Shillito R. D. et al. (1985) Bio/Technol 3, 1099-1102); microinjection into plant material (Crossway A et al., (1986) Mol. Gen. Genet. 202: 179-185); DNA or RNA-coated particle bombardment (Klein T M et al., (1987) Nature 327: 70) infection with (non-integrative) viruses and the like. Transgenic plants, including transgenic crop plants, are preferably produced via Agrobacterium-mediated transformation. An advantageous transformation method is the transformation in planta. To this end, it is possible, for example, to allow the agrobacteria to act on plant seeds or to inoculate the plant meristem with agrobacteria. It has proved particularly expedient in accordance with the invention to allow a suspension of transformed agrobacteria to act on the intact plant or at least on the flower primordia. The plant is subsequently grown on until the seeds of the treated plant are obtained (Clough and Bent, Plant J. (1998) 16, 735-743). Methods for Agrobacterium-mediated transformation of rice include well known methods for rice transformation, such as those described in any of the following: European patent application EP 1198985 A1, Aldemita and Hodges (Planta 199: 612-617, 1996); Chan et al. (Plant Mol Biol 22 (3): 491-506, 1993), Hiei at al. (Plant J 6 (2): 271-282, 1994), which disclosures are incorporated by reference herein as if fully set forth. In the case of corn transformation, the preferred method is as described in either Ishida et al. (Nat. Biotechnol 14(6): 745-50, 1996) or Frame et al. (Plant Physiol 129(1): 13-22, 2002), which disclosures are incorporated by reference herein as if fully set forth. Said methods are further described by way of example in B. Jenes at al., Techniques for Gene Transfer, in: Transgenic Plants, Vol. 1, Engineering and Utilization, eds. S. D. Kung and R. Wu, Academic Press (1993) 128-143 and in Potrykus Annu. Rev. Plant Physiol. Plant Molec. Biol. 42 (1991) 205-225). The nucleic acids or the construct to be expressed is preferably cloned into a vector, which is suitable for transforming Agrobacterium tumefaciens, for example pBin19 (Bevan et al., Nucl. Acids Res. 12 (1984) 8711). Agrobacteria transformed by such a vector can then be used in known manner for the transformation of plants, such as plants used as a model, like Arabidopsis (Arabidopsis thaliana is within the scope of the present invention not considered as a crop plant), or crop plants such as, by way of example, tobacco plants, for example by immersing bruised leaves or chopped leaves in an agrobacterial solution and then culturing them in suitable media. The transformation of plants by means of Agrobacterium tumefaciens is described, for example, by Höfgen and Willmitzer in Nucl. Acid Res. (1988) 16, 9877 or is known inter alia from F. F. White, Vectors for Gene Transfer in Higher Plants; in Transgenic Plants, Vol. 1, Engineering and Utilization, eds. S. D. Kung and R. Wu, Academic Press, 1993, pp. 15-38.

[0138] In addition to the transformation of somatic cells, which then have to be regenerated into intact plants, it is also possible to transform the cells of plant meristems and in particular those cells which develop into gametes. In this case, the transformed gametes follow the natural plant development, giving rise to transgenic plants. Thus, for example, seeds of Arabidopsis are treated with agrobacteria and seeds are obtained from the developing plants of which a certain proportion is transformed and thus transgenic [Feldman, K A and Marks M D (1987). Mol Gen Genet. 208:274-289; Feldmann K (1992). In: C Koncz, N-H Chua and J Shell, eds, Methods in Arabidopsis Research. Word Scientific, Singapore, pp. 274-289]. Alternative methods are based on the repeated removal of the inflorescences and incubation of the excision site in the center of the rosette with transformed agrobacteria, whereby transformed seeds can likewise be obtained at a later point in time (Chang (1994). Plant J. 5: 551-558; Katavic (1994). Mal Gen Genet, 245: 363-370). However, an especially effective method is the vacuum infiltration method with its modifications such as the “floral dip” method. In the case of vacuum infiltration of Arabidopsis, intact plants under reduced pressure are treated with an agrobacterial suspension [Bechthold, N (1993). C R Acad Sci Paris Life Sci, 316: 1194-1199], while in the case of the “floral dip” method the developing floral tissue is incubated briefly with a surfactant-treated agrobacterial suspension [Clough, S J and Bent A F (1998) The Plant J. 16, 735-743]. A certain proportion of transgenic seeds are harvested in both cases, and these seeds can be distinguished from non-transgenic seeds by growing under the above-described selective conditions. In addition the stable transformation of plastids is of advantages because plastids are inherited maternally is most crops reducing or eliminating the risk of transgene flow through pollen. The transformation of the chloroplast genome is generally achieved by a process which has been schematically displayed in Klaus et al., 2004 [Nature Biotechnology 22 (2), 225-229]. Briefly the sequences to be transformed are cloned together with a selectable marker gene between flanking sequences homologous to the chloroplast genome. These homologous flanking sequences direct site specific integration into the plastome. Plastidal transformation has been described for many different plant species and an overview is given in Bock (2001) Transgenic plastids in basic research and plant biotechnology. J Mol. Biol. 2001 Sep. 21; 312 (3):425-38 or Maliga, P (2003) Progress towards commercialization of plastid transformation technology. Trends Biotechnol. 21, 20-28. Further biotechnological progress has recently been reported in form of marker free plastid transformants, which can be produced by a transient co-integrated maker gene (Klaus et al., 2004, Nature Biotechnology 22(2), 225-229).

[0139] The genetically modified plant cells can be regenerated via all methods with which the skilled worker is familiar. Suitable methods can be found in the above-mentioned publications by S. D. Kung and R. Wu, Potrykus or Höfgen and Willmitzer.

[0140] Generally after transformation, plant cells or cell groupings are selected for the presence of one or more markers which are encoded by plant-expressible genes co-transferred with the gene of interest, following which the transformed material is regenerated into a whole plant. To select transformed plants, the plant material obtained in the transformation is, as a rule, subjected to selective conditions so that transformed plants can be distinguished from untransformed plants. For example, the seeds obtained in the above-described manner can be planted and, after an initial growing period, subjected to a suitable selection by spraying. A further possibility consists in growing the seeds, if appropriate after sterilization, on agar plates using a suitable selection agent so that only the transformed seeds can grow into plants. Alternatively, the transformed plants are screened for the presence of a selectable marker such as the ones described above.

[0141] Following DNA transfer and regeneration, putatively transformed plants may also be evaluated, for instance using Southern analysis, for the presence of the gene of interest, copy number and/or genomic organisation. Alternatively or additionally, expression levels of the newly introduced DNA may be monitored using Northern and/or Western analysis, both techniques being well known to persons having ordinary skill in the art.

[0142] The generated transformed plants may be propagated by a variety of means, such as by clonal propagation or classical breeding techniques. For example, a first generation (or T1) transformed plant may be selfed and homozygous second-generation (or T2) transformants selected, and the T2 plants may then further be propagated through classical breeding techniques. The generated transformed organisms may take a variety of forms. For example, they may be chimeras of transformed cells and non-transformed cells; clonal transformants (e.g., all cells transformed to contain the expression cassette); grafts of transformed and untransformed tissues (e.g., in plants, a transformed rootstock grafted to an untransformed scion).

### T-DNA Activation Tagging

[0143] T-DNA activation tagging (Hayashi et al. Science (1992) 1350-1353), involves insertion of T-DNA, usually containing a promoter (may also be a translation enhancer or an intron), in the genomic region of the gene of interest or 10 kb up- or downstream of the coding region of a gene in a configuration such that the promoter directs expression of the targeted gene. Typically, regulation of expression of the targeted gene by its natural promoter is disrupted and the gene falls under the control of the newly introduced promoter. The promoter is typically embedded in a T-DNA. This T-DNA is randomly inserted into the plant genome, for example, through Agrobacterium infection and leads to modified expression of genes near the inserted T-DNA. The resulting transgenic plants show dominant phenotypes due to modified expression of genes close to the introduced promoter.

### Tilling

[0144] The term “TILLING” is an abbreviation of “Targeted Induced Local Lesions In Genomes” and refers to a mutagenesis technology useful to generate and/or identify nucleic acids encoding proteins with modified expression and/or activity. TILLING also allows selection of plants carrying such mutant variants. These mutant variants may exhibit modified expression, either in strength or in location or in timing (if the mutations affect the promoter for example). These mutant variants may exhibit higher activity than that exhibited by the gene in its natural form. TILLING combines high-density mutagenesis with high-throughput screening methods. The steps typically followed in TILLING are: (a) EMS mutagenesis (Redei G P and Koncz C (1992) In Methods in Arabidopsis Research, Koncz C, Chua N H, Schell J, eds. Singapore, World Scientific Publishing Co, pp. 16-82; Feldmann et al., (1994) In Meyerowitz E M, Somerville C R, eds, Arabidopsis. Cold Spring Harbor Laboratory Press, Cold Spring Harbor, N.Y., pp 137-172; Lightner J and Caspar T (1998) In J Martinez-Zapater, J Salinas, eds, Methods on Molecular Biology, Vol. 82. Humana Press, Totowa, N.J., pp 91-104); (b) DNA preparation and pooling of individuals; (c) PCR amplification of a region of interest; (d) denaturation and annealing to allow formation of heteroduplexes; (e) DHPLC, where the presence of a heteroduplex in a pool is detected as an extra peak in the chromatogram; (f) identification of the mutant individual; and (g) sequencing of the mutant PCR product. Methods for TILLING are well known in the art (McCallum et al., (2000) Nat Biotechnol 18: 455-457; reviewed by Stemple (2004) Nat Rev Genet. 5(2): 145-50).

### Homologous Recombination

[0145] Homologous recombination allows introduction in a genome of a selected nucleic acid at a defined selected position. Homologous recombination is a standard technology used routinely in biological sciences for lower organisms such as yeast or the moss Physcomitrella. Methods for performing homologous recombination in plants have been described not only for model plants (Offring a et al. (1990) EMBO J. 9(10): 3077-84) but also for crop plants, for example rice (Terada et al. (2002) Nat Biotech 20(10): 1030-4; lida and Terada (2004) Curr Opin Biotech 15(2): 132-8), and approaches exist that are generally applicable regardless of the target organism (Miller et al, Nature Biotechnol. 25, 778-785, 2007).

### Yield Related Traits

[0146] Yield related traits comprise one or more of yield, biomass, seed yield, early vigour, greenness index, increased growth rate, improved agronomic traits (such as improved Water Use Efficiency (WUE), Nitrogen Use Efficiency (NUE), etc.).

### Yield

[0147] The term “yield” in general means a measurable produce of economic value, typically related to a specified crop, to an area, and to a period of time. Individual plant parts directly contribute to yield based on their number, size and/or weight, or the actual yield is the yield per square meter for a crop and year, which is determined by dividing total production (includes both harvested and appraised production) by planted square meters. The term “yield” of a plant may relate to vegetative biomass (root and/or shoot biomass), to reproductive organs, and/or to propagules (such as seeds) of that plant.

[0148] Taking corn as an example, a yield increase may be manifested as one or more of the following: increase in the number of plants established per square meter, an increase in the number of ears per plant, an increase in the number of rows, number of kernels per row, kernel weight, thousand kernel weight, ear length/diameter, increase in the seed filling rate (which is the number of filled seeds divided by the total number of seeds and multiplied by 100), among others. Taking rice as an example, a yield increase may manifest itself as an increase in one or more of the following: number of plants per square meter, number of panicles per plant, panicle length, number of spikelets per panicle, number of flowers (florets) per panicle, increase in the seed filling rate (which is the number of filled seeds divided by the total number of seeds and multiplied by 100), increase in thousand kernel weight, among others. In rice, submergence tolerance may also result in increased yield.

### Early Vigour

[0149] “Early vigour” refers to active healthy well-balanced growth especially during early stages of plant growth, and may result from increased plant fitness due to, for example, the plants being better adapted to their environment (i.e. optimizing the use of energy resources and partitioning between shoot and root). Plants having early vigour also show increased seedling survival and a better establishment of the crop, which often results in highly uniform fields (with the crop growing in uniform manner, i.e. with the majority of plants reaching the various stages of development at substantially the same time), and often better and higher yield. Therefore, early vigour may be determined by measuring various factors, such as thousand kernel weight, percentage germination, percentage emergence, seedling growth, seedling height, root length, root and shoot biomass and many more.

### Increased Growth Rate

[0150] The increased growth rate may be specific to one or more parts of a plant (including seeds), or may be throughout substantially the whole plant. Plants having an increased growth rate may have a shorter life cycle. The life cycle of a plant may be taken to mean the time needed to grow from a dry mature seed up to the stage where the plant has produced dry mature seeds, similar to the starting material. This life cycle may be influenced by factors such as speed of germination, early vigour, growth rate, greenness index, flowering time and speed of seed maturation. The increase in growth rate may take place at one or more stages in the life cycle of a plant or during substantially the whole plant life cycle. Increased growth rate during the early stages in the life cycle of a plant may reflect enhanced vigour. The increase in growth rate may alter the harvest cycle of a plant allowing plants to be sown later and/or harvested sooner than would otherwise be possible (a similar effect may be obtained with earlier flowering time). If the growth rate is sufficiently increased, it may allow for the further sowing of seeds of the same plant species (for example sowing and harvesting of rice plants followed by sowing and harvesting of further rice plants all within one conventional growing period). Similarly, if the growth rate is sufficiently increased, it may allow for the further sowing of seeds of different plants species (for example the sowing and harvesting of corn plants followed by, for example, the sowing and optional harvesting of soybean, potato or any other suitable plant). Harvesting additional times from the same rootstock in the case of some crop plants may also be possible. Altering the harvest cycle of a plant may lead to an increase in annual biomass production per square meter (due to an increase in the number of times (say in a year) that any particular plant may be grown and harvested). An increase in growth rate may also allow for the cultivation of transgenic plants in a wider geographical area than their wild-type counterparts, since the territorial limitations for growing a crop are often determined by adverse environmental conditions either at the time of planting (early season) or at the time of harvesting (late season). Such adverse conditions may be avoided if the harvest cycle is shortened. The growth rate may be determined by deriving various parameters from growth curves, such parameters may be: T-Mid (the time taken for plants to reach 50% of their maximal size) and T-90 (time taken for plants to reach 90% of their maximal size), amongst others.

### Stress Resistance

[0151] An increase in yield and/or growth rate occurs whether the plant is under non-stress conditions or whether the plant is exposed to various stresses compared to control plants. Plants typically respond to exposure to stress by growing more slowly. In conditions of severe stress, the plant may even stop growing altogether. Mild stress on the other hand is defined herein as being any stress to which a plant is exposed which does not result in the plant ceasing to grow altogether without the capacity to resume growth. Mild stress in the sense of the invention leads to a reduction in the growth of the stressed plants of less than 40%, 35%, 30% or 25%, more preferably less than 20% or 15% in comparison to the control plant under non-stress conditions. Due to advances in agricultural practices (irrigation, fertilization, pesticide treatments) severe stresses are not often encountered in cultivated crop plants. As a consequence, the compromised growth induced by mild stress is often an undesirable feature for agriculture. Mild stresses are the everyday biotic and/or abiotic (environmental) stresses to which a plant is exposed. Abiotic stresses may be due to drought or excess water, anaerobic stress, salt stress, chemical toxicity, oxidative stress and hot, cold or freezing temperatures. The abiotic stress may be an osmotic stress caused by a water stress (particularly due to drought), salt stress, oxidative stress or an ionic stress. Biotic stresses are typically those stresses caused by pathogens, such as bacteria, viruses, fungi, nematodes and insects.

[0152] In particular, the methods of the present invention may be performed under non-stress conditions or under conditions of mild drought to give plants having increased yield relative to control plants. As reported in Wang et al. (Planta (2003) 218: 1-14), abiotic stress leads to a series of morphological, physiological, biochemical and molecular changes that adversely affect plant growth and productivity. Drought, salinity, extreme temperatures and oxidative stress are known to be interconnected and may induce growth and cellular damage through similar mechanisms. Rabbani et al. (Plant Physiol (2003) 133: 1755-1767) describes a particularly high degree of “cross talk” between drought stress and high-salinity stress. For example, drought and/or salinisation are manifested primarily as osmotic stress, resulting in the disruption of homeostasis and ion distribution in the cell. Oxidative stress, which frequently accompanies high or low temperature, salinity or drought stress, may cause denaturing of functional and structural proteins. As a consequence, these diverse environmental stresses often activate similar cell signalling pathways and cellular responses, such as the production of stress proteins, up-regulation of anti-oxidants, accumulation of compatible solutes and growth arrest. The term “non-stress” conditions as used herein are those environmental conditions that allow optimal growth of plants. Persons skilled in the art are aware of normal soil conditions and climatic conditions for a given location. Plants with optimal growth conditions, (grown under non-stress conditions) typically yield in increasing order of preference at least 97%, 95%, 92%, 90%, 87%, 85%, 83%, 80%, 77% or 75% of the average production of such plant in a given environment. Average production may be calculated on harvest and/or season basis. Persons skilled in the art are aware of average yield productions of a crop.

[0153] Nutrient deficiency may result from a lack of nutrients such as nitrogen, phosphates and other phosphorous-containing compounds, potassium, calcium, magnesium, manganese, iron and boron, amongst others.

[0154] The term salt stress is not restricted to common salt (NaCl), but may be any one or more of: NaCl, KCl, LiCl, MgCl₂, CaCl₂, amongst others.

### Increase/Improve/Enhance

[0155] The terms “increase”, “improve” or “enhance” are interchangeable and shall mean in the sense of the application at least a 3%, 4%, 5%, 6%, 7%, 8%, 9% or 10%, preferably at least 15% or 20%, more preferably 25%, 30%, 35% or 40% more yield and/or growth in comparison to control plants as defined herein.

### Seed Yield

[0156] Increased seed yield may manifest itself as one or more of the following: a) an increase in seed biomass (total seed weight) which may be on an individual seed basis and/or per plant and/or per square meter; b) increased number of flowers per plant; c) increased number of (filled) seeds; d) increased seed filling rate (which is expressed as the ratio between the number of filled seeds divided by the total number of seeds); e) increased harvest index, which is expressed as a ratio of the yield of harvestable parts, such as seeds, divided by the total biomass; and f) increased thousand kernel weight (TKW), which is extrapolated from the number of filled seeds counted and their total weight. An increased TKW may result from an increased seed size and/or seed weight, and may also result from an increase in embryo and/or endosperm size.

[0157] An increase in seed yield may also be manifested as an increase in seed size and/or seed volume. Furthermore, an increase in seed yield may also manifest itself as an increase in seed area and/or seed length and/or seed width and/or seed perimeter. Increased yield may also result in modified architecture, or may occur because of modified architecture.

### Greenness Index

[0158] The “greenness index” as used herein is calculated from digital images of plants. For each pixel belonging to the plant object on the image, the ratio of the green value versus the red value (in the RGB model for encoding color) is calculated. The greenness index is expressed as the percentage of pixels for which the green-to-red ratio exceeds a given threshold. Under normal growth conditions, under salt stress growth conditions, and under reduced nutrient availability growth conditions, the greenness index of plants is measured in the last imaging before flowering. In contrast, under drought stress growth conditions, the greenness index of plants is measured in the first imaging after drought.

### Marker Assisted Breeding

[0159] Such breeding programmes sometimes require introduction of allelic variation by mutagenic treatment of the plants, using for example EMS mutagenesis; alternatively, the programme may start with a collection of allelic variants of so called “natural” origin caused unintentionally. Identification of allelic variants then takes place, for example, by PCR. This is followed by a step for selection of superior allelic variants of the sequence in question and which give increased yield. Selection is typically carried out by monitoring growth performance of plants containing different allelic variants of the sequence in question. Growth performance may be monitored in a greenhouse or in the field. Further optional steps include crossing plants in which the superior allelic variant was identified with another plant. This could be used, for example, to make a combination of interesting phenotypic features.

### Use as Probes in (Gene Mapping)

[0160] Use of nucleic acids encoding the protein of interest for genetically and physically mapping the genes requires only a nucleic acid sequence of at least 15 nucleotides in length. These nucleic acids may be used as restriction fragment length polymorphism (RFLP) markers. Southern blots (Sambrook J, Fritsch E F and Maniatis T (1989) Molecular Cloning, A Laboratory Manual) of restriction-digested plant genomic DNA may be probed with the nucleic acids encoding the protein of interest. The resulting banding patterns may then be subjected to genetic analyses using computer programs such as MapMaker (Lander et al. (1987) Genomics 1: 174-181) in order to construct a genetic map. In addition, the nucleic acids may be used to probe Southern blots containing restriction endonuclease-treated genomic DNAs of a set of individuals representing parent and progeny of a defined genetic cross. Segregation of the DNA polymorphisms is noted and used to calculate the position of the nucleic acid encoding the protein of interest in the genetic map previously obtained using this population (Botstein et al. (1980) Am. J. Hum. Genet. 32:314-331).

[0161] The production and use of plant gene-derived probes for use in genetic mapping is described in Bernatzky and Tanksley (1986) Plant Mal. Biol. Reporter 4: 37-41. Numerous publications describe genetic mapping of specific cDNA clones using the methodology outlined above or variations thereof. For example, F2 intercross populations, backcross populations, randomly mated populations, near isogenic lines, and other sets of individuals may be used for mapping. Such methodologies are well known to those skilled in the art.

[0162] The nucleic acid probes may also be used for physical mapping (i.e., placement of sequences on physical maps; see Hoheisel et al. In: Non-mammalian Genomic Analysis: A Practical Guide, Academic press 1996, pp. 319-346, and references cited therein).

[0163] In another embodiment, the nucleic acid probes may be used in direct fluorescence in situ hybridisation (FISH) mapping (Trask (1991) Trends Genet. 7:149-154). Although current methods of FISH mapping favour use of large clones (several kb to several hundred kb; see Laan et al. (1995) Genome Res. 5:13-20), improvements in sensitivity may allow performance of FISH mapping using shorter probes.

[0164] A variety of nucleic acid amplification-based methods for genetic and physical mapping may be carried out using the nucleic acids. Examples include allele-specific amplification (Kazazian (1989) J. Lab. Clin. Med. 11:95-96), polymorphism of PCR-amplified fragments (CAPS; Sheffield et al. (1993) Genomics 16:325-332), allele-specific ligation (Landegren et al. (1988) Science 241:1077-1080), nucleotide extension reactions (Sokolov (1990) Nucleic Acid Res. 18:3671), Radiation Hybrid Mapping (Walter et al. (1997) Nat. Genet. 7:22-28) and Happy Mapping (Dear and Cook (1989) Nucleic Acid Res. 17:6795-6807). For these methods, the sequence of a nucleic acid is used to design and produce primer pairs for use in the amplification reaction or in primer extension reactions. The design of such primers is well known to those skilled in the art. In methods employing PCR-based genetic mapping, it may be necessary to identify DNA sequence differences between the parents of the mapping cross in the region corresponding to the instant nucleic acid sequence. This, however, is generally not necessary for mapping methods.

### Plant

[0165] The term “plant” as used herein encompasses whole plants, ancestors and progeny of the plants and plant parts, including seeds, shoots, stems, leaves, roots (including tubers), flowers, and tissues and organs, wherein each of the aforementioned comprise the gene/nucleic acid of interest. The term “plant” also encompasses plant cells, suspension cultures, callus tissue, embryos, meristematic regions, gametophytes, sporophytes, pollen and microspores, again wherein each of the aforementioned comprises the gene/nucleic acid of interest.

[0166] Plants that are particularly useful in the methods of the invention include all plants which belong to the superfamily Viridiplantae, in particular monocotyledonous and dicotyledonous plants including fodder or forage legumes, ornamental plants, food crops, trees or shrubs selected from the list comprising Acer spp., Actinidia spp., Abelmoschus spp., Agave sisalana, Agropyron spp., Agrostis stolonifera, Allium spp., Amaranthus spp., Ammophila arenaria, Ananas comosus, Annona spp., Apium graveolens, Arachis spp, Artocarpus spp., Asparagus officinalis, Avena spp. (e.g. Avena sativa, Avena fatua, Avena byzantina, Avena fatua var. sativa, Avena hybrida), Averrhoa carambola, Bambusa sp., Benincasa hispida, Bertholletia excelsea, Beta vulgaris, Brassica spp. (e.g. Brassica napus, Brassica rapa ssp. [canola, oilseed rape, turnip rape]), Cadaba farinosa, Camellia sinensis, Canna indica, Cannabis sativa, Capsicum spp., Carex elata, Carica papaya, Carissa macrocarpa, Carya spp., Carthamus tinctorius, Castanea spp., Ceiba pentandra, Cichorium endivia, Cinnamomum spp., Citrullus lanatus, Citrus spp., Cocos spp., Coffea spp., Colocasia esculenta, Cola spp., Corchorus sp., Coriandrum sativum, Corylus spp., Crataegus spp., Crocus sativus, Cucurbita spp., Cucumis spp., Cynara spp., Daucus carota, Desmodium spp., Dimocarpus longan, Dioscorea spp., Diospyros spp., Echinochloa spp., Elaeis (e.g. Elaeis guineensis, Elaeis oleifera), Eleusine coracana, Eragrostis tef, Erianthus sp., Eriobotrya japonica, Eucalyptus sp., Eugenia uniflora, Fagopyrum spp., Fagus spp., Festuca arundinacea, Ficus carica, Fortunella spp., Fragaria spp., Ginkgo biloba, Glycine spp. (e.g. Glycine max, Soja hispida or Soja max), Gossypium hirsutum, Helianthus spp. (e.g. Helianthus annuus), Hemerocallis fulva, Hibiscus spp., Hordeum spp. (e.g. Hordeum vulgare), Ipomoea batatas, Juglans spp., Lactuca sativa, Lathyrus spp., Lens culinaris, Linum usitatissimum, Litchi chinensis, Lotus spp., Luffa acutangula, Lupinus spp., Luzula sylvatica, Lycopersicon spp. (e.g. Lycopersicon esculentum, Lycopersicon lycopersicum, Lycopersicon pyriforme), Macrotyloma spp., Malus spp., Malpighia emarginata, Mammea americana, Mangifera indica, Manihot spp., Manilkara zapota, Medicago sativa, Melilotus spp., Mentha spp., Miscanthus sinensis, Momordica spp., Morus nigra, Musa spp., Nicotiana spp., Olea spp., Opuntia spp., Ornithopus spp., Oryza spp. (e.g. Oryza sativa, Oryza latifolia), Panicum miliaceum, Panicum virgatum, Passiflora edulis, Pastinaca sativa, Pennisetum sp., Persea spp., Petroselinum crispum, Phalaris arundinacea, Phaseolus spp., Phleum pratense, Phoenix spp., Phragmites australis, Physalis spp., Pinus spp., Pistacia vera, Pisum spp., Poa spp., Populus spp., Prosopis spp., Prunus spp., Psidium spp., Punica granatum, Pyrus communis, Quercus spp., Raphanus sativus, Rheum rhabarbarum, Ribes spp., Ricinus communis, Rubus spp., Saccharum spp., Salix sp., Sambucus spp., Secale cereale, Sesamum spp., Sinapis sp., Solanum spp. (e.g. Solanum tuberosum, Solanum integrifolium or Solanum lycopersicum), Sorghum bicolor, Spinacia spp., Syzygium spp., Tagetes spp., Tamarindus indica, Theobroma cacao, Trifolium spp., Tripsacum dactyloides, Triticosecale rimpaui, Triticum spp. (e.g. Triticum aestivum, Triticum durum, Triticum turgidum, Triticum hybernum, Triticum macha, Triticum sativum, Triticum monococcum or Triticum vulgare), Tropaeolum minus, Tropaeolum majus, Vaccinium spp., Vicia spp., Vigna spp., Viola odorata, Vitis spp., Zea mays, Zizania palustris, Ziziphus spp., amongst others.

### Control Plant(s)

[0167] The choice of suitable control plants is a routine part of an experimental setup and may include corresponding wild type plants or corresponding plants without the gene of interest. The control plant is typically of the same plant species or even of the same variety as the plant to be assessed. The control plant may also be a nullizygote of the plant to be assessed. Nullizygotes are individuals missing the transgene by segregation. A “control plant” as used herein refers not only to whole plants, but also to plant parts, including seeds and seed parts.

### DETAILED DESCRIPTION OF THE INVENTION

[0168] Surprisingly, it has now been found that modulating expression in a plant of a nucleic acid encoding a LDOX polypeptide gives plants having enhanced yield-related traits relative to control plants. According to a first embodiment, the present invention provides a method for enhancing yield-related traits in plants relative to control plants, comprising modulating expression in a plant of a nucleic acid encoding a LDOX polypeptide and optionally selecting for plants having enhanced yield-related traits.

[0169] Furthermore, it has now surprisingly been found that modulating expression in a plant of a nucleic acid encoding a YRP5 polypeptide gives plants having enhanced abiotic stress tolerance relative to control plants. According to a first embodiment, the present invention provides a method for enhancing tolerance to various abiotic stresses in plants relative to control plants, comprising modulating expression in a plant of a nucleic acid encoding a YRP5 polypeptide and optionally selecting for plants having enhanced tolerance to abiotic stress.

[0170] Furthermore, it has now surprisingly been found that modulating expression in a plant of a nucleic acid encoding a CK1 polypeptide gives plants having enhanced yield-related traits relative to control plants. According to a first embodiment, the present invention provides a method for enhancing yield-related traits in plants relative to control plants, comprising modulating expression in a plant of a nucleic acid encoding a CK1 polypeptide and optionally selecting for plants having enhanced yield-related traits.

[0171] Furthermore, it has now surprisingly been found that modulating expression in a plant of a nucleic acid encoding a bHLH12-like polypeptide gives plants having enhanced yield-related traits relative to control plants. According to a first embodiment, the present invention provides a method for enhancing yield-related traits in plants relative to control plants, comprising modulating expression in a plant of a nucleic acid encoding a bHLH12-like polypeptide and optionally selecting for plants having enhanced yield-related traits.

[0172] Furthermore, it has now surprisingly been found that modulating expression in a plant of a nucleic acid encoding an ADH2 polypeptide gives plants having enhanced yield-related traits relative to control plants. According to a first embodiment, the present invention provides a method for enhancing yield-related traits in plants relative to control plants, comprising modulating expression in a plant of a nucleic acid encoding an ADH2 polypeptide and optionally selecting for plants having enhanced yield-related traits.

[0173] Furthermore, it has now surprisingly been found that modulating expression in a plant of a nucleic acid encoding a GCN5-like polypeptide gives plants having enhanced yield-related traits relative to control plants. According to a first embodiment, the present invention provides a method for enhancing yield-related traits in plants relative to control plants, comprising modulating expression in a plant of a nucleic acid encoding a GCN5-like polypeptide and optionally selecting for plants having enhanced yield-related traits.

[0174] A preferred method for modulating (preferably, increasing) expression of a nucleic acid encoding an LDOX polypeptide, or a YRP5 polypeptide, or a CK1 polypeptide, or a bHLH12-like polypeptide, or an ADH2 polypeptide, or a GCN5-like polypeptide, is by introducing and expressing in a plant a nucleic acid encoding an LDOX polypeptide, or a YRP5 polypeptide, or a CK1 polypeptide, or a bHLH12-like polypeptide, or an ADH2 polypeptide, or a GCN5-like polypeptide.

[0175] Concerning LDOX polypeptides, any reference hereinafter to a “protein useful in the methods of the invention” is taken to mean a LDOX polypeptide as defined herein. Any reference hereinafter to a “nucleic acid useful in the methods of the invention” is taken to mean a nucleic acid capable of encoding such a LDOX polypeptide. The nucleic acid to be introduced into a plant (and therefore useful in performing the methods of the invention) is any nucleic acid encoding the type of protein which will now be described, hereafter also named “LDOX nucleic acid” or “LDOX gene”.

[0176] Concerning YRP5 polypeptides, any reference hereinafter to a “protein useful in the methods of the invention” is taken to mean a YRP5 polypeptide as defined herein. Any reference hereinafter to a “nucleic acid useful in the methods of the invention” is taken to mean a nucleic acid capable of encoding such a YRP5 polypeptide. The nucleic acid to be introduced into a plant (and therefore useful in performing the methods of the invention) is any nucleic acid encoding the type of protein which will now be described, hereafter also named “YRP5 nucleic acid” or “YRP5 gene”.

[0177] Concerning CK1 polypeptides, any reference hereinafter to a “protein useful in the methods of the invention” is taken to mean a CK1 polypeptide as defined herein. Any reference hereinafter to a “nucleic acid useful in the methods of the invention” is taken to mean a nucleic acid capable of encoding such a CK1 polypeptide. The nucleic acid to be introduced into a plant (and therefore useful in performing the methods of the invention) is any nucleic acid encoding the type of protein which will now be described, hereafter also named “CK1 nucleic acid” or “CK1 gene”.

[0178] Concerning bHLH12-like polypeptides, any reference hereinafter to a “protein useful in the methods of the invention” is taken to mean a bHLH12-like polypeptide as defined herein. Any reference hereinafter to a “nucleic acid useful in the methods of the invention” is taken to mean a nucleic acid capable of encoding such a bHLH12-like polypeptide. The nucleic acid to be introduced into a plant (and therefore useful in performing the methods of the invention) is any nucleic acid encoding the type of protein which will now be described, hereafter also named “bHLH12-like nucleic acid” or “bHLH12-like gene”.

[0179] Concerning ADH2 polypeptides, any reference hereinafter to a “protein useful in the methods of the invention” is taken to mean an ADH2 polypeptide as defined herein. Any reference hereinafter to a “nucleic acid useful in the methods of the invention” is taken to mean a nucleic acid capable of encoding such an ADH2 polypeptide. The nucleic acid to be introduced into a plant (and therefore useful in performing the methods of the invention) is any nucleic acid encoding the type of protein which will now be described, hereafter also named “ADH2 nucleic acid” or “ADH2 gene”.

[0180] Concerning GCN5 polypeptides, any reference hereinafter to a “protein useful in the methods of the invention” is taken to mean a GCN5-like polypeptide as defined herein. Any reference hereinafter to a “nucleic acid useful in the methods of the invention” is taken to mean a nucleic acid capable of encoding such a GCN5-like polypeptide. The nucleic acid to be introduced into a plant (and therefore useful in performing the methods of the invention) is any nucleic acid encoding the type of protein which will now be described, hereafter also named “GCN5 nucleic acid” or “GCN5 gene”.

[0181] A “LDOX polypeptide” as defined herein refers to any leucoanthocyanidin dioxygenase polypeptide comprising an Isopenicillin N synthase domain (PRINTS entry PR00682) and a 20G-Fe(II) oxygenase domain (PFAM entry PF03171).

[0182] Preferably, the LDOX polypeptide comprises one or more of the following motifs:

Motif 1, (SEQ ID NO: 173):
W[VIY]T[VA]K[CP][HV]P[DHN][AS][IFL]I[VM][HN][IV]GD[QT]I[EQ]ILSN[GS][KT]YKS[VI][EL]
HR[GV][LI]VN[KS][ED]K[VE]R[VI]S[WL]A[VF]F[CY][EN]
Motif 2, (SEQ ID NO: 174):
[ED][DNE][LI][LG][AL][QC][LM][KR][IV]NYYP[KP]CP[RQ]P[ED]L[AT]LG[VL][ES][AP]H[ST]D
[PMV][SG][AG][LM]T[FI][LI]L[PH][ND][DEM]
Motif 3, (SEQ ID NO: 175):
WG[FV][FM][QH][VL]VNHG[IV][PSK]P[ED]L[MI][DE][RA][AV][RQ][EK][AVN][GW][RK][EA]FF
[HE][LM]PV[NE][AE]KE[KT]Y[AS]N[DS][PQ]
Motif 4, (SEQ ID NO: 176):
[DHG][AS][FL][VI]VN[IV]GD[QT][IL][EQ]IL[ST]N[GS][RT][YF][KR]SV[LE]HR[VA][VIL]VN
Motif 5, (SEQ ID NO: 177):
WGFFQ[VL]VNHG[VI][PKS]xEL[ILM][DE][RA]

wherein x represents any amino acid, preferably a proline;

Motif 6, (SEQ ID NO: 178):
LG[LV][GS][PA]H[TS]DP[GS]x[LMI]T[IL]L

wherein x represents any amino acid, preferably a glycine.

[0183] More preferably, the LDOX polypeptide also comprises at least one of the following motifs:

Motif 7 (SEQ ID NO: 179):
Pxx[YF][IV][KQR]

wherein x represents any amino acid, preferably a proline and a arginine respectively in position 2 and 3;

Motif 8 (SEQ ID NO: 180):
V[QE][SAT][LIV]
Motif 9 (SEQ ID NO: 181):
[EQ]GYG[ST]

[0184] The amino acids residues between brackets represent alternatives for that particular position. Furthermore preferably, the LDOX polypeptide comprises in increasing order of preference, at least 2, at least 3, at least 4, at least 5, at least 6, at least 7, at least 8, or all 9 motifs.

[0185] Alternatively, the homologue of a LDOX protein has in increasing order of preference at least 25%, 26%, 27%, 28%, 29%, 30%, 31%, 32%, 33%, 34%, 35%, 36%, 37%, 38%, 39%, 40%, 41%, 42%, 43%, 44%, 45%, 46%, 47%, 48%, 49%, 50%, 51%, 52%, 53%, 54%, 55%, 56%, 57%, 58%, 59%, 60%, 61%, 62%, 63%, 64%, 65%, 66%, 67%, 68%, 69%, 70%, 71%, 72%, 73%, 74%, 75%, 76%, 77%, 78%, 79%, 80%, 81%, 82%, 83%, 84%, 85%, 86%, 87%, 88%, 89%, 90%, 91%, 92%, 93%, 94%, 95%, 96%, 97%, 98%, or 99% overall sequence identity to the amino acid represented by SEQ ID NO: 2, provided that the homologous protein comprises one or more of the conserved motifs as outlined above.

[0186] The overall sequence identity is determined using a global alignment algorithm, such as the Needleman Wunsch algorithm in the program GAP (GCG Wisconsin Package, Accelrys), preferably with default parameters and preferably with sequences of mature proteins (i.e. without taking into account secretion signals or transit peptides). Compared to overall sequence identity, the sequence identity will generally be higher when only conserved domains or motifs are considered. Preferably the motifs in a LDOX polypeptide have, in increasing order of preference, at least 70%, 71%, 72%, 73%, 74%, 75%, 76%, 77%, 78%, 79%, 80%, 81%, 82%, 83%, 84%, 85%, 86%, 87%, 88%, 89%, 90%, 91%, 92%, 93%, 94%, 95%, 96%, 97%, 98%, or 99% sequence identity to the motifs represented by SEQ ID NO: 173 to SEQ ID NO: 181 (Motifs 1 to 9).

[0187] Preferably, the polypeptide sequence which when used in the construction of a phylogenetic tree, such as the one depicted in FIG. 4, clusters within the group of LDOX polypeptides rather than with any other group; more preferably, the polypeptide sequence clusters within the subgroup A of the LDOX polypeptides comprising the amino acid sequence represented by SEQ ID NO: 2.

[0188] A “YRP5 polypeptide” as defined herein refers to any polypeptide comprising orthologues and paralogues of the sequences represented by any of SEQ ID NO: 186 and SEQ ID NO: 188.

[0189] YRP5 polypeptides and orthologues and paralogues thereof typically have in increasing order of preference at least 25%, 26%, 27%, 28%, 29%, 30%, 31%, 32%, 33%, 34%, 35%, 36%, 37%, 38%, 39%, 40%, 41%, 42%, 43%, 44%, 45%, 46%, 47%, 48%, 49%, 50%, 51%, 52%, 53%, 54%, 55%, 56%, 57%, 58%, 59%, 60%, 61%, 62%, 63%, 64%, 65%, 66%, 67%, 68%, 69%, 70%, 71%, 72%, 73%, 74%, 75%, 76%, 77%, 78%, 79%, 80%, 81%, 82%, 83%, 84%, 85%, 86%, 87%, 88%, 89%, 90%, 91%, 92%, 93%, 94%, 95%, 96%, 97%, 98%, or 99% overall sequence identity to the amino acid represented by any of SEQ ID NO: 186 and SEQ ID NO: 188.

[0190] The overall sequence identity is determined using a global alignment algorithm, such as the Needleman Wunsch algorithm in the program GAP (GCG Wisconsin Package, Accelrys), preferably with default parameters and preferably with sequences of mature proteins (i.e. without taking into account secretion signals or transit peptides). Compared to overall sequence identity, the sequence identity will generally be higher when only conserved domains or motifs are considered.

[0191] Preferably, the polypeptide sequence which when used in the construction of a phylogenetic tree, clusters with the group of YRP5 polypeptides comprising the amino acid sequences represented by SEQ ID NO: 186 and SEQ ID NO: 188 rather than with any other group. Tools and techniques for the construction and analysis of phylogenetic trees are well known in the art.

[0192] A “CK1 polypeptide” as defined herein refers to any protein kinases of the Casein kinase 1 family (IUBMB Enzyme Nomenclature: EC 2.7.11.1). Casein kinase 1 proteins are well known in the art. CK1 polypeptides catalyze the reaction: ATP+a protein=ADP+a phosphoprotein.

[0193] Alternatively, A “CK1 polypeptide” can be defined as a polypeptide comprising a protein motif having in increasing order of preference at least 50%, 51%, 52%, 53%, 54%, 55%, 56%, 57%, 58%, 59%, 60%, 61%, 62%, 63%, 64%, 65%, 66%, 67%, 68%, 69%, 70%, 71%, 72%, 73%, 74%, 75%, 76%, 77%, 78%, 79%, 80%, 81%, 82%, 83%, 84%, 85%, 86%, 87%, 88%, 89%, 90%, 91%, 92%, 93%, 94%, 95%, 96%, 97%, 98%, or 99% sequence identity to the amino acid sequence of one or more of the following motifs:

(i) Motif 10:
(SEQ ID NO: 273)
HIPYRENKNLTGTARYAS(VM)NTHLG(IV)EQSRRDDLESLGYVL(ML)
YFLRGSLPW,
(ii) Motif 11:
(SEQ ID NO: 274)
PSLEDLFN(YF)C(NSG)RK(FL)SLKTVLMLADQ(ML)INR(VI)E(YF)
(VM)H S(KR)(SG)FLHRDIKP,
(iii) Motif 12:
(SEQ ID NO: 275)
C(KR)(SG)YP(ST)EFASYFHYCRSLRF(DE)D(KR)PDY(SA)YLKR
(LI)FRDLFIREG(FY)QFDYVF

[0194] wherein amino acid residues between brackets represent alternative amino acids at that position.

[0195] Alternatively, a “CK1 polypeptide” can be defined as a polypeptide comprising one or more of the following motifs:

(SEQ ID NO: 273)
(i) Motif 10:
HIPYRENKNLTGTARYAS(VM)NTHLG(IV)EQSRRDDLESLGYVL(ML)
YFLRGSLPW,
(SEQ ID NO: 274)
(ii) Motif 11:
PSLEDLFN(YF)C(NSG)RK(FL)SLKTVLMLADQ(ML)INR(VI)E
(YF)(VM)H S(KR)(SG)FLHRDIKP,
(SEQ ID NO: 275)
(iii) Motif 12:
C(KR)(SG)YP(ST)EFASYFHYCRSLRF(DE)D(KR)PDY(SA)YLKR
(LI)FRDLFIREG(FY)QFDYVF

[0196] wherein amino acid residues between brackets represent alternative amino acids at that position, and wherein in decreasing order of preference 1, 2, 3, 4, 5, 6, 7, 8, 9, 10, 11, 12, 13, 14, 15, 16, 17, 18, 19, 20, 21, 22, 23, 24 and 25 amino acids of each motif are substituted by any other amino acid, preferably by a conservative amino acid (according to Table 1).

[0197] Additionally, a “CK1 polypeptide” comprises:

A. a protein motif having in increasing order of preference at least 50%, 51%, 52%, 53%, 54%, 55%, 56%, 57%, 58%, 59%, 60%, 61%, 62%, 63%, 64%, 65%, 66%, 67%, 68%, 69%, 70%, 71%, 72%, 73%, 74%, 75%, 76%, 77%, 78%, 79%, 80%, 81%, 82%, 83%, 84%, 85%, 86%, 87%, 88%, 89%, 90%, 91%, 92%, 93%, 94%, 95%, 96%, 97%, 98%, or 99% sequence identity to the amino acid sequence of one or more of the following motifs:

(SEQ ID NO: 276)
(i) Motif 13:
KANQVY(IV)ID(YF)GLAKKYRDLQTH(KR)HIPYRENKNLTGTARYAS
VNTHLG(VI)EQ,
(SEQ ID NO: 277)
(ii) Motif 14:
CKSYPSEF(VTI)SYFHYCRSLRFEDKPDYSYLKRLFRDLFIREGYQF
DYVFDW,
(SEQ ID NO: 278)
(iii) Motif 15:
PSLEDLFNYC(NS)RK(FL)(ST)LKTVLMLADQ(LM)INRVEYMHSRGF
LHRDIKPDNFLM

[0198] wherein amino acid residues between brackets represent alternative amino acids at that position; or
   B. one or more of the following motifs:

(SEQ ID NO: 276)
(i) Motif 13:
KANQVY(IV)ID(YF)GLAKKYRDLQTH(KR)HIPYRENKNLTGTARYAS
VNTHLG(VI)EQ,
(SEQ ID NO: 277)
(ii) Motif 14:
CKSYPSEF(VTI)SYFHYCRSLRFEDKPDYSYLKRLFRDLFIREGYQF
DYVFDW,
(SEQ ID NO: 278)
(iii) Motif 15:
PSLEDLFNYC(NS)RK(FL)(ST)LKTVLMLADQ(LM)INRVEYMHSRGFL
HRDIKPDNFLM

[0199] wherein amino acid residues between brackets represent alternative amino acids at that position, and wherein in decreasing order of preference 1, 2, 3, 4, 5, 6, 7, 8, 9, 10, 11, 12, 13, 14, 15, 16, 17, 18, 19, 20, 21, 22, 23, 24 and 25 amino acids of each motif are substituted by any other amino acid, preferably by a conservative amino acid (according to Table 1).

[0200] Motifs 10, 11 and 12 correspond to a consensus sequences which represent conserved protein regions in a casein kinase polypeptides of plant origin. Motifs 13, 14 and 15 correspond to a consensus sequences which represent conserved protein regions in a casein kinase type I (CK1) polypeptides of plant origin. It is understood that Motif 10, 11, 12, 13, 14 and 15 as referred herein encompass the sequence of the homologous motif as present in a specific casein kinase I polypeptide, preferably in any casein kinase I polypeptide of Table A3, more preferably in SEQ ID NO: 195. Methods to identify the homologous motif to Motifs 10 to 15 in a polypeptide are well known in the art. For example the polypeptide may be compared to the motif by aligning their respective amino acid sequence to identify regions with similar sequence using an algorithm such as Blast (Altschul et al. (1990) J Mol Biol 215: 403-10).

[0201] Alternatively, the homologue of a CK1 protein has in increasing order of preference at least 25%, 26%, 27%, 28%, 29%, 30%, 31%, 32%, 33%, 34%, 35%, 36%, 37%, 38%, 39%, 40%, 41%, 42%, 43%, 44%, 45%, 46%, 47%, 48%, 49%, 50%, 51%, 52%, 53%, 54%, 55%, 56%, 57%, 58%, 59%, 60%, 61%, 62%, 63%, 64%, 65%, 66%, 67%, 68%, 69%, 70%, 71%, 72%, 73%, 74%, 75%, 76%, 77%, 78%, 79%, 80%, 81%, 82%, 83%, 84%, 85%, 86%, 87%, 88%, 89%, 90%, 91%, 92%, 93%, 94%, 95%, 96%, 97%, 98%, or 99% overall sequence identity to the amino acid sequences represented by any of the polypeptides of Table A3, preferably by SEQ ID NO: 195.

[0202] The overall sequence identity is determined using a global alignment algorithm, such as the Needleman Wunsch algorithm in the program GAP (GCG Wisconsin Package, Accelrys), preferably with default parameters and preferably with sequences of mature proteins (i.e. without taking into account secretion signals or transit peptides). Compared to overall sequence identity, the sequence identity will generally be higher when only conserved domains or motifs are considered. For local alignments, the Smith-Waterman algorithm is particularly useful (Smith T F, Waterman M S (1981) J. Mol. Biol. 147(1); 195-7).

[0203] Preferably, the polypeptide sequence which when used in the construction of a phylogenetic tree, constructed with the sequences of Table A3, clusters with the group of CK1 polypeptides comprising the amino acid sequence represented by any of: A.thaliana_AT5G44100.1, A.thaliana_AT4G14340.1, B.napus_BN06MC08360_{—}42724797 @8337, H.vulgare_TA34160_{—}4513, O.sativa_LOC_Os02g56560.1, P.trichocarpa_scaff XIII.465, S.officinarum_TA30972_{—}4547, Z.mays_TA179031_{—}4577, more preferably of A.thaliana_AT5G44100.1 (SEQ ID NO: 195) rather than with any other group.

[0204] The invention also provides hitherto unknown CK1-encoding nucleic acids and CK1 polypeptides.

[0205] According to a further embodiment of the present invention, there is therefore provided an isolated nucleic acid molecule selected from:
[0206] (i) a nucleic acid represented by any one of SEQ ID NO: 210, 212, 216, 220, 228 and 268;
[0207] (ii) the complement of a nucleic acid represented by any one of SEQ ID NO: 210, 212, 216, 220, 228 and 268;
[0208] (iii) a nucleic acid encoding the polypeptide as represented by any one of SEQ ID NO: 211, 213, 217, 221, 229 and 269 preferably as a result of the degeneracy of the genetic code, said isolated nucleic acid can be derived from a polypeptide sequence as represented by any one of SEQ ID NO: 211, 213, 217, 221, 229 and 269 and further preferably confers enhanced yield-related traits relative to control plants;
[0209] (iv) a nucleic acid having, in increasing order of preference at least 30%, 31%, 32%, 33%, 34%, 35%, 36%, 37%, 38%, 39%, 40%, 41%, 42%, 43%, 44%, 45%, 46%, 47%, 48%, 49%, 50%, 51%, 52%, 53%, 54%, 55%, 56%, 57%, 58%, 59%, 60%, 61%, 62%, 63%, 64%, 65%, 66%, 67%, 68%, 69%, 70%, 71%, 72%, 73%, 74%, 75%, 76%, 77%, 78%, 79%, 80%, 81%, 82%, 83%, 84%, 85%, 86%, 87%, 88%, 89%, 90%, 91%, 92%, 93%, 94%, 95%, 96%, 97%, 98%, or 99% sequence identity with any of the nucleic acid sequences of Table A3 and further preferably conferring enhanced yield-related traits relative to control plants;
[0210] (v) a nucleic acid molecule which hybridizes with a nucleic acid molecule of (i) to (iv) under stringent hybridization conditions and preferably confers enhanced yield-related traits relative to control plants;
[0211] (vi) a nucleic acid encoding a CK1 polypeptide having, in increasing order of preference, at least 50%, 51%, 52%, 53%, 54%, 55%, 56%, 57%, 58%, 59%, 60%, 61%, 62%, 63%, 64%, 65%, 66%, 67%, 68%, 69%, 70%, 71%, 72%, 73%, 74%, 75%, 76%, 77%, 78%, 79%, 80%, 81%, 82%, 83%, 84%, 85%, 86%, 87%, 88%, 89%, 90%, 91%, 92%, 93%, 94%, 95%, 96%, 97%, 98%, or 99% sequence identity to the amino acid sequence represented by any one of SEQ ID NO: 211, 213, 217, 221, 229 and 269 and any of the other amino acid sequences in Table A3 and preferably conferring enhanced yield-related traits relative to control plants.

[0212] According to a further embodiment of the present invention, there is also provided an isolated polypeptide selected from:
[0213] (i) an amino acid sequence represented by any one of SEQ ID NO: 211, 213, 217, 221, 229 and 269;
[0214] (ii) an amino acid sequence having, in increasing order of preference, at least 50%, 51%, 52%, 53%, 54%, 55%, 56%, 57%, 58%, 59%, 60%, 61%, 62%, 63%, 64%, 65%, 66%, 67%, 68%, 69%, 70%, 71%, 72%, 73%, 74%, 75%, 76%, 77%, 78%, 79%, 80%, 81%, 82%, 83%, 84%, 85%, 86%, 87%, 88%, 89%, 90%, 91%, 92%, 93%, 94%, 95%, 96%, 97%, 98%, or 99% sequence identity to the amino acid sequence represented by any one of SEQ ID NO: 211, 213, 217, 221, 229 and 269 and any of the other amino acid sequences in Table A3 and preferably conferring enhanced yield-related traits relative to control plants;
[0215] (iii) derivatives of any of the amino acid sequences given in (i) or (ii) above.

[0216] A “bHLH12-like polypeptide” as defined herein refers to any polypeptide comprising a basic domain followed by a HLH domain (HMMPFam PF00010, ProfileScan PS50888, SMART SM00353) thereby forming a basic helix-loop-helix domain (Interpro IPR001092), and comprising a protein motif having in increasing order of preference at least 50%, 51%, 52%, 53%, 54%, 55%, 56%, 57%, 58%, 59%, 60%, 61%, 62%, 63%, 64%, 65%, 66%, 67%, 68%, 69%, 70%, 71%, 72%, 73%, 74%, 75%, 76%, 77%, 78%, 79%, 80%, 81%, 82%, 83%, 84%, 85%, 86%, 87%, 88%, 89%, 90%, 91%, 92%, 93%, 94%, 95%, 96%, 97%, 98%, or 99% sequence identity to the amino acid of one or more of the following motifs:
[0217] Motif 16 (SEQ ID NO: 404): YIHVRARRG;
[0218] Motif 17 (SEQ ID NO: 405): (S/E)P(P/K)(K/E)DYIHVRARRGQ wherein any of the first 4 amino acids or the last amino acid may be substituted by any amino acid, preferably Motif 17 is (S/E)P(P/K)(K/E)DYIHVRARRGQ, wherein any of the first 4 amino acids or the last amino acid may be substituted by a conserved amino acid;
[0219] Motif 18 (SEQ ID NO: 406): (R/N/C)QVE(F/N)LSMKL(S/A/T)(V/A)(N/S), wherein amino acids in position 1, 5, and 11 may be substituted by any amino acid, preferably Motif 18 is (R/N/C)QVE(F/N)LSMKL(S/A/T)(V/A)(N/S), wherein amino acids in position 1, 5, and 11 may be substituted by a conserved amino acid.
[0220] Motif 19 (SEQ ID NO: 407): AD-FVERAARYSC, wherein “-” represents a gap with no amino acid or any amino acid, preferably P or G. In particular, motif 19 can be any of ADFVERAARYSC, ADXXFVERAARYSC, ADXFVERAARYSC, wherein X can be any amino acid, preferably P or G.

[0221] bHLH domains are well known in the art and registered in protein domain databases such as Interpro, ProfileScan, PFam and SMART. Alternatively, a bHLH12-like polypeptide comprises a domain bHLH domain having at least 90%, 91%, 92%, 93%, 94%, 95%, 96%, 97%, 98%, or 99% sequence identity to the amino acid of the bHLH domain represented by SEQ ID NO: 403: ATDSHSLAERVRREKISERMKFLQDLVPGCNKVTGKAVMLDEIINYV QSL.

[0222] Alternatively, a bHLH12-like polypeptide comprises a bHLH domain represented by SEQ ID NO: 403: ATDSHSLAERVRREKISERMKFLQDLVPGCNKVTGKAVMLDEIINYVQS, wherein in decreasing order of preference 0, 1, 2, 3, 4 or 5 amino acids may be substituted by any amino acid, preferably by a conservative amino acid.

[0223] Alternatively, a bHLH12-like nucleic acid of the invention is any nucleic acid encoding a polypeptide belonging to group XII (12) as defined by Heim et al. 2003 and any homologous molecule, preferably a paralogue or an orthologue thereof, preferably having equivalent biological function, for example controlling expression of the same gene. Nucleic acids encompassed by the definition need not originate from a natural organism, but may have any origin, for example may be chemically synthesized. The homologous bHLH12-like nucleic acids encompassed by the invention encode a polypeptide which when used in the construction of a phylogenetic tree, constructed with the polypeptide sequences referred to in FIG. 4 of Heim et al. (2003), clusters with any of the polypeptides of the Group XII in FIG. 4 of Heim et al. (2003), preferably within BEE3, rather than with any other group.

[0224] A pattern of amino acids, termed a 5-9-13 configuration, may be found at three positions within the basic region of the bHLH domain (see FIG. 4 of Heim et al., 2003 (Mol. Biol. Evol. 20(5):735-747). A bHLH12-like polypeptide preferably comprises a 5-9-13 configuration represented by the amino acids H-E-R, located within the bHLH domain, typically within the basic region of the domain. The skilled in the art will recognize that, though being the most frequent configuration, other configurations may be allowed.

[0225] bHLH12-like polypeptides of the invention, preferably bind to a promoter comprising a at least 1, 2, 3, 4, 5 6, 7, 8, 10 or more E-motifs as represented by SEQ ID NO: 408 (CANNTG), wherein N stands for anyone of A, T, G or C.

[0226] Alternatively, the homologue of a bHLH12-like protein useful in the methods of the invention has in increasing order of preference at least 25%, 26%, 27%, 28%, 29%, 30%, 31%, 32%, 33%, 34%, 35%, 36%, 37%, 38%, 39%, 40%, 41%, 42%, 43%, 44%, 45%, 46%, 47%, 48%, 49%, 50%, 51%, 52%, 53%, 54%, 55%, 56%, 57%, 58%, 59%, 60%, 61%, 62%, 63%, 64%, 65%, 66%, 67%, 68%, 69%, 70%, 71%, 72%, 73%, 74%, 75%, 76%, 77%, 78%, 79%, 80%, 81%, 82%, 83%, 84%, 85%, 86%, 87%, 88%, 89%, 90%, 91%, 92%, 93%, 94%, 95%, 96%, 97%, 98%, or 99% overall sequence identity to the amino acid represented by any of the polypeptides of Table A4, preferably to SEQ ID NO: 280 or to SEQ ID NO: 396, provided that the homologous protein is a bHLH12-like polypeptide as defined herein.

[0227] The overall sequence identity is determined using a global alignment algorithm, such as the Needleman Wunsch algorithm in the program GAP (GCG Wisconsin Package, Accelrys), preferably with default parameters and preferably with sequences of mature proteins (i.e. without taking into account secretion signals or transit peptides). Compared to overall sequence identity, the sequence identity will generally be higher when only conserved domains or motifs are considered. For local alignments, the Smith-Waterman algorithm is particularly useful (Smith T F, Waterman M S (1981) J. Mol. Biol. 147(1); 195-7).

[0228] The invention also provides hitherto unknown bHLH12-like-encoding nucleic acids and bHLH12-like polypeptides.

[0229] According to a further embodiment of the present invention, there is therefore provided an isolated nucleic acid molecule selected from:
[0230] (i) a nucleic acid represented by any one of SEQ ID NO: 279 and 335;
[0231] (ii) the complement of a nucleic acid represented by any one of SEQ ID NO: 279 and 335;
[0232] (iii) a nucleic acid encoding the polypeptide as represented by any one of SEQ ID NO: 2 and 58 preferably as a result of the degeneracy of the genetic code, said isolated nucleic acid can be derived from a polypeptide sequence as represented by any one of SEQ ID NO: 280 and 336 and further preferably confers enhanced yield-related traits relative to control plants;
[0233] (iv) a nucleic acid having, in increasing order of preference at least 30%, 31%, 32%, 33%, 34%, 35%, 36%, 37%, 38%, 39%, 40%, 41%, 42%, 43%, 44%, 45%, 46%, 47%, 48%, 49%, 50%, 51%, 52%, 53%, 54%, 55%, 56%, 57%, 58%, 59%, 60%, 61%, 62%, 63%, 64%, 65%, 66%, 67%, 68%, 69%, 70%, 71%, 72%, 73%, 74%, 75%, 76%, 77%, 78%, 79%, 80%, 81%, 82%, 83%, 84%, 85%, 86%, 87%, 88%, 89%, 90%, 91%, 92%, 93%, 94%, 95%, 96%, 97%, 98%, or 99% sequence identity with any of the nucleic acid sequences of Table A4 and further preferably conferring enhanced yield-related traits relative to control plants;
[0234] (v) a nucleic acid molecule which hybridizes with a nucleic acid molecule of (i) to (iv) under stringent hybridization conditions and preferably confers enhanced yield-related traits relative to control plants;
[0235] (vi) a nucleic acid encoding a bHLH12-like polypeptide having, in increasing order of preference, at least 50%, 51%, 52%, 53%, 54%, 55%, 56%, 57%, 58%, 59%, 60%, 61%, 62%, 63%, 64%, 65%, 66%, 67%, 68%, 69%, 70%, 71%, 72%, 73%, 74%, 75%, 76%, 77%, 78%, 79%, 80%, 81%, 82%, 83%, 84%, 85%, 86%, 87%, 88%, 89%, 90%, 91%, 92%, 93%, 94%, 95%, 96%, 97%, 98%, or 99% sequence identity to the amino acid sequence represented by any one of SEQ ID NO: 280 and 336 and any of the other amino acid sequences in Table A4 and preferably conferring enhanced yield-related traits relative to control plants.

[0236] According to a further embodiment of the present invention, there is also provided an isolated polypeptide selected from:
[0237] (i) an amino acid sequence represented by any one of SEQ ID NO: 280 and 336;
[0238] (ii) an amino acid sequence having, in increasing order of preference, at least 50%, 51%, 52%, 53%, 54%, 55%, 56%, 57%, 58%, 59%, 60%, 61%, 62%, 63%, 64%, 65%, 66%, 67%, 68%, 69%, 70%, 71%, 72%, 73%, 74%, 75%, 76%, 77%, 78%, 79%, 80%, 81%, 82%, 83%, 84%, 85%, 86%, 87%, 88%, 89%, 90%, 91%, 92%, 93%, 94%, 95%, 96%, 97%, 98%, or 99% sequence identity to the amino acid sequence represented by any one of SEQ ID NO: 280 and 336 and any of the other amino acid sequences in Table A4 and preferably conferring enhanced yield-related traits relative to control plants.
[0239] (iii) derivatives of any of the amino acid sequences given in (i) or (ii) above.

[0240] An “ADH2 polypeptide” as defined herein refers to any polypeptide comprising Domain 1 and Domain 2 and optionally additionally Domain 3:
[0241] (i) GROES Domain (Domain 1): AGEVRVKILFTALCHTDHYTWSGKDPEGLFPCI LGHEAAGVVESVGEGVTEVQPGDHVIPCYQAECKECKFCKSGKTNLCGKVRG ATGVGVMMNDMKSRFSVNGKPIYHFTGTSTFSQYTVVHDVSVAKI (SEQ ID NO: 442), or a domain having in increasing order of preference at least 50%, 55%, 60%, 65%, 70%, 75%, 80%, 85%, 90%, 95% or more sequence identity to Domain 1; and
[0242] (ii) Zinc-binding dehydrogenase domain (Domain 2): AGSIVAVFGLGTVGLAVAE GAKAAGASRIIGIDIDNKKFDVAKNFGVTEFVNPKDHDKPIQQVLVDLTDGGVDY SFECIGNVSVMRAALECCHKDWGTSVIVGVAASGQEIATRPFQLVTGRVWKGT AFGGFKSRTQVPWLVD (SEQ ID NO: 443), or a domain having in increasing order of preference at least 50%, 55%, 60%, 65%, 70%, 75%, 80%, 85%, 90%, 95% or more sequence identity to Domain 2; and optionally in addition
[0243] (iii) DUF61 Domain (Domain 3): VDKYMNKEVK (SEQ ID NO: 444), or a domain having in increasing order of preference at least 50%, 55%, 60%, 65%, 70%, 75%, 80%, 85%, 90%, 95% or more sequence identity to Domain 3.

[0244] In addition, an ADH polypeptide may sometimes comprise any one or more of Motifs 20 to 30 or a Motif having in increasing order of preference at least 50%, 55%, 60%, 65%, 70%, 75%, 80%, 85%, 90%, 95% or more sequence identity to Domain 3 any one of Motifs 20 to 30.

(SEQ ID NO: 445)
Motif 20: HYTWSGKDP;
(SEQ ID NO: 446)
Motif 21: PCYQAECK;
(SEQ ID NO: 447)
Motif 22: GKTNLCGKVRGATGVGVMMND;
(SEQ ID NO: 448)
Motif 23: YHFMGTSTFSQYTVVHDVSVAKINPQAPLDKVCLLGCGVP
TGLG;
(SEQ ID NO: 449)
Motif 24: WNTAKVEAGSIVAVFGLGTVGLAVAEG;
(SEQ ID NO: 450)
Motif 25: GASRIIGIDIDNKKFDVAKNFGVTEFVN;
(SEQ ID NO: 451)
Motif 26: KDHDKPIQLVLVDIAD;
(SEQ ID NO: 452)
Motif 27: SVRRAAEEC;
(SEQ ID NO: 453)
Motif 28: WGTSVIVGVAASGQEIATRPFQLVTGRVWKGTAFGGF;
(SEQ ID NO: 454)
Motif 29: KVDEYITH;
(SEQ ID NO: 455)
Motif 30: MLKGESIRCIITM.

[0245] The ADH2 polypeptide has in increasing order of preference at least 25%, 26%, 27%, 28%, 29%, 30%, 31%, 32%, 33%, 34%, 35%, 36%, 37%, 38%, 39%, 40%, 41%, 42%, 43%, 44%, 45%, 46%, 47%, 48%, 49%, 50%, 51%, 52%, 53%, 54%, 55%, 56%, 57%, 58%, 59%, 60%, 61%, 62%, 63%, 64%, 65%, 66%, 67%, 68%, 69%, 70%, 71%, 72%, 73%, 74%, 75%, 76%, 77%, 78%, 79%, 80%, 81%, 82%, 83%, 84%, 85%, 86%, 87%, 88%, 89%, 90%, 91%, 92%, 93%, 94%, 95%, 96%, 97%, 98%, or 99% overall sequence identity to the amino acid represented by SEQ ID NO: 413 or SEQ ID NO: 415 and preferably comprises Domains 1 and 2 and optionally Domain 3.

[0246] The overall sequence identity is determined using a global alignment algorithm, such as the Needleman Wunsch algorithm in the program GAP (GCG Wisconsin Package, Accelrys), preferably with default parameters and preferably with sequences of mature proteins (Le. without taking into account secretion signals or transit peptides). Compared to overall sequence identity, the sequence identity will generally be higher when only conserved domains or motifs are considered. For local alignments, the Smith-Waterman algorithm is particularly useful (Smith T F, Waterman M S (1981) J. Mol. Biol. 147(1); 195-7).

[0247] Preferably, the ADH2 polypeptide sequence which when used in the construction of a phylogenetic tree, such as the one depicted in FIG. 12, clusters with the group of ADH2 polypeptides comprising the amino acid sequence represented by SEQ ID NO: 413 or SEQ ID NO: 415 rather than with any other group.

[0248] The “GCN5-like polypeptide” as defined herein refers to any polypeptide comprising two domains with PFam accession numbers PF00583 and PF00439, respectively with an average of 76 and 84 amino acids. Further, the GCN5-like polypeptide also comprises the following motifs:

[0249] Motif 31: LKF[VL]C[YL]SNDGVD[EQ]HM[IV]WL[IV]GLKNIFARQLPNMPKEYIVRLVMDR [ST]HKS[MV]M (SEQ ID NO: 501) or a motif having in an increasing order of preference at least 49%, 50%, 51%, 52%, 53%, 54%, 55%, 56%, 57%, 58%, 59%, 60%, 61%, 62%, 63%, 64%, 65%, 66%, 67%, 68%, 69%, 70%, 71%, 72%, 73%, 74%, 75%, 76%, 77%, 78%, 79%, 80%, 81%, 82%, 83%, 84%, 85%, 86%, 87%, 88%, 89%, 90%, 91%, 92%, 93%, 94%, 95%, 96%, 97%, 98%, or 99% or more sequence identity to Motif 31.

[0250] Motif 32: FGEIAFCAITADEQVKGYGTRLMNHLKQ[HY]ARD[AV]DGLTHFLTYADNNAVGY (SEQ ID NO: 502) or a motif having in an increasing order of preference at least 49%, 50%, 51%, 52%, 53%, 54%, 55%, 56%, 57%, 58%, 59%, 60%, 61%, 62%, 63%, 64%, 65%, 66%, 67%, 68%, 69%, 70%, 71%, 72%, 73%, 74%, 75%, 76%, 77%, 78%, 79%, 80%, 81%, 82%, 83%, 84%, 85%, 86%, 87%, 88%, 89%, 90%, 91%, 92%, 93%, 94%, 95%, 96%, 97%, 98%, or 99% or more sequence identity to Motif 32.

[0251] Motif 33: H[AP]DAWPFKEPVD[SA]RDVPDYYDIIKDP[IM]DLKT[MI]S[KR]RV[ED]SEQYYVT LEMFVA (SEQ ID NO: 503) or a motif having in an increasing order of preference at least 49%, 50%, 51%, 52%, 53%, 54%, 55%, 56%, 57%, 58%, 59%, 60%, 61%, 62%, 63%, 64%, 65%, 66%, 67%, 68%, 69%, 70%, 71%, 72%, 73%, 74%, 75%, 76%, 77%, 78%, 79%, 80%, 81%, 82%, 83%, 84%, 85%, 86%, 87%, 88%, 89%, 90%, 91%, 92%, 93%, 94%, 95%, 96%, 97%, 98%, or 99% or more sequence identity to Motif 33.

[0252] Preferably, the GCN5-like polypeptide of the invention may additionally comprise any one or more of the following motifs:

[0253] Motif 34: LKIF[LV]C[YL]SNDG[VI]DEHM[IV]WL[IV]GLKNIFARQLPNMPKEYIVRLVMDR[TS] HKS[MV]M (SEQ ID NO: 504) or a motif having in an increasing order of preference at least 50%, 51%, 52%, 53%, 54%, 55%, 56%, 57%, 58%, 59%, 60%, 61%, 62%, 63%, 64%, 65%, 66%, 67%, 68%, 69%, 70%, 71%, 72%, 73%, 74%, 75%, 76%, 77%, 78%, 79%, 80%, 81%, 82%, 83%, 84%, 85%, 86%, 87%, 88%, 89%, 90%, 91%, 92%, 93%, 94%, 95%, 96%, 97%, 98%, or 99% or more sequence identity to Motif 34.

[0254] Motif 35: FGEIAFCAITADEQVKGYGTRLMNHLKQHARD[AVM]DGLTHFLTYADNNAVGY (SEQ ID NO: 505) or a motif having in an increasing order of preference at least 50%, 51%, 52%, 53%, 54%, 55%, 56%, 57%, 58%, 59%, 60%, 61%, 62%, 63%, 64%, 65%, 66%, 67%, 68%, 69%, 70%, 71%, 72%, 73%, 74%, 75%, 76%, 77%, 78%, 79%, 80%, 81%, 82%, 83%, 84%, 85%, 86%, 87%, 88%, 89%, 90%, 91%, 92%, 93%, 94%, 95%, 96%, 97%, 98%, or 99% or more sequence identity to Motif 35.

[0255] Motif 36: KQGFTKEI[THY][LF][DE]K[ED]RW[QH]GYIKDYDGGILMECKID[PQ]KLPY[TV]DL [AS]TMIRRQRQ (SEQ ID NO: 506) or a motif having in an increasing order of preference at least 50%, 51%, 52%, 53%, 54%, 55%, 56%, 57%, 58%, 59%, 60%, 61%, 62%, 63%, 64%, 65%, 66%, 67%, 68%, 69%, 70%, 71%, 72%, 73%, 74%, 75%, 76%, 77%, 78%, 79%, 80%, 81%, 82%, 83%, 84%, 85%, 86%, 87%, 88%, 89%, 90%, 91%, 92%, 93%, 94%, 95%, 96%, 97%, 98%, or 99% or more sequence identity to Motif 36.

[0256] In another preferred embodiment of the present invention the GCN5-like polypeptide of the invention may additionally comprise any one or more of the following motifs:

[0257] Motif 37: LKFVC[LY]SND[GDS][VI]DEHM[VM][WCR]LIGLKNIFARQLPNMPKEYIVRL[VL]M DR[SGK]HKSVM (SEQ ID NO: 507) or a motif having in an increasing order of preference at least 50%, 51%, 52%, 53%, 54%, 55%, 56%, 57%, 58%, 59%, 60%, 61%, 62%, 63%, 64%, 65%, 66%, 67%, 68%, 69%, 70%, 71%, 72%, 73%, 74%, 75%, 76%, 77%, 78%, 79%, 80%, 81%, 82%, 83%, 84%, 85%, 86%, 87%, 88%, 89%, 90%, 91%, 92%, 93%, 94%, 95%, 96%, 97%, 98%, or 99% or more sequence identity to Motif 37.

[0258] Motif 38: CAITADEQVKGYGTRLMNHLKQ[HFY]ARD[MV]DGLTHFLTYADNNAVGYF[IV]K QGF (SEQ ID NO: 508) or a motif having in an increasing order of preference at least 50%, 51%, 52%, 53%, 54%, 55%, 56%, 57%, 58%, 59%, 60%, 61%, 62%, 63%, 64%, 65%, 66%, 67%, 68%, 69%, 70%, 71%, 72%, 73%, 74%, 75%, 76%, 77%, 78%, 79%, 80%, 81%, 82%, 83%, 84%, 85%, 86%, 87%, 88%, 89%, 90%, 91%, 92%, 93%, 94%, 95%, 96%, 97%, 98%, or 99% or more sequence identity to Motif 38.

[0259] Motif 39: W[QH]G[YF]KDYDGG[IL]LMECKID[PQ]KL[PS]YTDLS[TS]MIR[RQ]QR[QK]AIDE [KR]IRELSNC[HQ][IN] (SEQ ID NO: 509) or a motif having in an increasing order of preference at least 50%, 51%, 52%, 53%, 54%, 55%, 56%, 57%, 58%, 59%, 60%, 61%, 62%, 63%, 64%, 65%, 66%, 67%, 68%, 69%, 70%, 71%, 72%, 73%, 74%, 75%, 76%, 77%, 78%, 79%, 80%, 81%, 82%, 83%, 84%, 85%, 86%, 87%, 88%, 89%, 90%, 91%, 92%, 93%, 94%, 95%, 96%, 97%, 98%, or 99% or more sequence identity to Motif 39.

[0260] In a most preferred embodiment of the present invention the GCN5-like polypeptide of the invention may additionally comprise any one or more of the following motifs:

[0261] Motif 40: FLCYSNDGVDEHMIWLVGLKNIFARQLPNMPKEYIVRLVMDRTHKSMMVI (SEQ ID NO: 510) or a motif having in an increasing order of preference at least 50%, 51%, 52%, 53%, 54%, 55%, 56%, 57%, 58%, 59%, 60%, 61%, 62%, 63%, 64%, 65%, 66%, 67%, 68%, 69%, 70%, 71%, 72%, 73%, 74%, 75%, 76%, 77%, 78%, 79%, 80%, 81%, 82%, 83%, 84%, 85%, 86%, 87%, 88%, 89%, 90%, 91%, 92%, 93%, 94%, 95%, 96%, 97%, 98%, or 99% or more sequence identity to Motif 40.

[0262] Motif 41: MNHLKQHARDADGLTHFLTYADNNAVGY[FL]VKQGFTKEIT[LF]DKERWQGYIK (SEQ ID NO: 511) or a motif having in an increasing order of preference at least 50%, 51%, 52%, 53%, 54%, 55%, 56%, 57%, 58%, 59%, 60%, 61%, 62%, 63%, 64%, 65%, 66%, 67%, 68%, 69%, 70%, 71%, 72%, 73%, 74%, 75%, 76%, 77%, 78%, 79%, 80%, 81%, 82%, 83%, 84%, 85%, 86%, 87%, 88%, 89%, 90%, 91%, 92%, 93%, 94%, 95%, 96%, 97%, 98%, or 99% or more sequence identity to Motif 41.

[0263] Motif 42: IR[ED]LSNCHIVY[SP]GIDFQKKEAGIPRR[LT][MI]KPEDI[PQ]GLREAGWTPDQ [WL]GHSK (SEQ ID NO: 512) or a motif having in an increasing order of preference at least 50%, 51%, 52%, 53%, 54%, 55%, 56%, 57%, 58%, 59%, 60%, 61%, 62%, 63%, 64%, 65%, 66%, 67%, 68%, 69%, 70%, 71%, 72%, 73%, 74%, 75%, 76%, 77%, 78%, 79%, 80%, 81%, 82%, 83%, 84%, 85%, 86%, 87%, 88%, 89%, 90%, 91%, 92%, 93%, 94%, 95%, 96%, 97%, 98%, or 99% or more sequence identity to Motif 42.

[0264] Motifs 31, 32 and 33 correspond to consensus sequences which represent conserved protein regions in a GCN5-like polypeptide of vascular plant origin. Motifs 34, 35 and 36 correspond to consensus sequences which represent conserved protein regions in a GCN5-like polypeptide of higher vascular plant origin. Motifs 37, 38 and 39 correspond to consensus sequences which represent conserved protein regions in a GCN5-like polypeptide of dicot plant origin and finally, Motifs 40, 41 and 42 correspond to consensus sequences which represent conserved protein regions in a GCN5-like polypeptide of monocot plant origin.

[0265] It is understood that Motif 31, 32, 33, 34, 35, and 36 as referred herein encompass the sequence of the homologous motif as present in a specific GCN5-like polypeptide, preferably in any GCN5-like polypeptide of Table A6, more preferably in SEQ ID NO: 460. Methods to Identify the homologous motif to Motifs 31 to 42 in a polypeptide are well known in the art. For example the polypeptide may be compared to the motif by aligning their respective amino acid sequence to identify regions with similar sequence using an algorithm such as Blast (Altschul et al. (1990) J Mol Biol 215: 403-10).

[0266] Alternatively, the homologue of the GCN5-like polypeptide has in increasing order of preference at least 25%, 26%, 27%, 28%, 29%, 30%, 31%, 32%, 33%, 34%, 35%, 36%, 37%, 38%, 39%, 40%, 41%, 42%, 43%, 44%, 45%, 46%, 47%, 48%, 49%, 50%, 51%, 52%, 53%, 54%, 55%, 56%, 57%, 58%, 59%, 60%, 61%, 62%, 63%, 64%, 65%, 66%, 67%, 68%, 69%, 70%, 71%, 72%, 73%, 74%, 75%, 76%, 77%, 78%, 79%, 80%, 81%, 82%, 83%, 84%, 85%, 86%, 87%, 88%, 89%, 90%, 91%, 92%, 93%, 94%, 95%, 96%, 97%, 98%, or 99% overall sequence identity to the amino acid represented by SEQ ID NO: 460, provided that the homologous polypeptide comprises one or more of the conserved motifs as outlined above.

[0267] The overall sequence identity is determined using a global alignment algorithm, such as the Needleman Wunsch algorithm in the program GAP (GCG Wisconsin Package, Accelrys), preferably with default parameters and preferably with sequences of mature proteins (i.e. without taking into account secretion signals or transit peptides). Compared to overall sequence identity, the sequence identity will generally be higher when only conserved domains or motifs are considered. For local alignments, the Smith-Waterman algorithm is particularly useful (Smith T F, Waterman M S (1981) J. Mol. Biol. 147(1); 195-7).

[0268] Preferably, the polypeptides sequences of GCN5, which when used in the construction of a phylogenetic tree, such as the one depicted in FIG. 15 clusters with the group of GCN5 polypeptides comprising the amino acid sequences represented respectively by SEQ ID NO: 460 rather than with any other group.

[0269] The terms “domain”, “signature” and “motif” are defined in the “definitions” section herein. Specialist databases exist for the identification of domains, for example, SMART (Schultz et al. (1998) Proc. Natl. Acad. Sci. USA 95, 5857-5864; Letunic et al. (2002) Nucleic Acids Res 30, 242-244), InterPro (Mulder et al., (2003) Nucl. Acids. Res. 31, 315-318), Prosite (Bucher and Bairoch (1994), A generalized profile syntax for biomolecular sequences motifs and its function in automatic sequence interpretation. (In) ISMB-94; Proceedings 2nd International Conference on Intelligent Systems for Molecular Biology. Altman R., Brutlag D., Karp P., Lathrop R., Searls D., Eds., pp 53-61, AAAI Press, Menlo Park; Hulo et al., Nucl. Acids. Res. 32:D134-D137, (2004)), or Pfam (Bateman et al., Nucleic Acids Research 30(1): 276-280 (2002)). A set of tools for in silico analysis of protein sequences is available on the ExPASy proteomics server (Swiss Institute of Bioinformatics; Gasteiger et al., Nucleic Acids Res. 31:3784-3788 (2003)). Domains or motifs may also be identified using routine techniques, such as by sequence alignment.

[0270] Methods for the alignment of sequences for comparison are well known in the art, such methods include GAP, BESTFIT, BLAST, FASTA and TFASTA. GAP uses the algorithm of Needleman and Wunsch ((1970) J Mol Biol 48: 443-453) to find the global (i.e. spanning the complete sequences) alignment of two sequences that maximizes the number of matches and minimizes the number of gaps. The BLAST algorithm (Altschul et al. (1990) J Mol Biol 215: 403-10) calculates percent sequence identity and performs a statistical analysis of the similarity between the two sequences. The software for performing BLAST analysis is publicly available through the National Centre for Biotechnology Information (NCBI). Homologues may readily be identified using, for example, the ClustalW multiple sequence alignment algorithm (version 1.83), with the default pairwise alignment parameters, and a scoring method in percentage. Global percentages of similarity and identity may also be determined using one of the methods available in the MatGAT software package (Campanella at al., BMC Bioinformatics. 2003 Jul. 10; 4:29. MatGAT: an application that generates similarity/identity matrices using protein or DNA sequences.). Minor manual editing may be performed to optimise alignment between conserved motifs, as would be apparent to a person skilled in the art. Furthermore, instead of using full-length sequences for the identification of homologues, specific domains may also be used. The sequence identity values may be determined over the entire nucleic acid or amino acid sequence or over selected domains or conserved motif(s), using the programs mentioned above using the default parameters. For local alignments, the Smith-Waterman algorithm is particularly useful (Smith T F, Waterman M S (1981) J. Mol. Biol. 147(1); 195-7).

[0271] Furthermore, LDOX polypeptides (at least in their native form) typically have oxidoreductase activity. In particular, LDOX proteins (EC 1.14.11.19) catalyse the following reaction

leucocyanidin+2-oxoglutarate+O2⇄cis- and trans-dihydroquercetins+succinate+CO₂+2H₂O

[0272] Tools and techniques for measuring LDOX activity are known in the art, see for example Saito et al. (Plant J. 17, 181-189, 1999) or Pelletier at al. (Plant Mol. Biol. 40, 45-54, 1999). Further details are provided in Example 6.

[0273] In addition, LDOX polypeptides, when expressed in rice according to the methods of the present invention as outlined in Examples 7 and 8, give plants having increased yield related traits, in particular increased biomass, increased seed yield and/or early vigour when grown under nutrient limitation.

[0274] YRP5 polypeptides, when expressed in plants, in particular in rice plants, confer enhanced tolerance to abiotic stresses to those plants.

[0275] Furthermore, CK1 polypeptides (at least in their native form) typically have casein kinase activity. Tools and techniques for measuring casein kinase activity are well known in the art Lee et al. Plant Cell 2005, 17, 2817_{—}31.

[0276] In addition, CK1 polypeptides, when expressed in rice according to the methods of the present invention as outlined in The Examples section, give plants having increased yield related traits, in particular increased thousand kernel weight or increase gravity centre of canopy.

[0277] Additionally, CK1 polypeptides may display a preferred subcellular localization, typically one or more of nuclear, citoplasmic, chloroplastic, or mitochondrial. The task of protein subcellular localisation prediction is important and well studied. Knowing a protein's localisation helps elucidate its function. Experimental methods for protein localization range from immunolocalization to tagging of proteins using green fluorescent protein (GFP) or beta-glucuronidase (GUS). Such methods are accurate although labor-intensive compared with computational methods. Recently much progress has been made in computational prediction of protein localisation from sequence data. Among algorithms well known to a person skilled in the art are available at the ExPASy Proteomics tools hosted by the Swiss Institute for Bioinformatics, for example, PSort, TargetP, ChloroP, LocTree, Predotar, LipoP, MITOPROT, PATS, PTS1, SignalP, TMHMM, and others. CK 1 polypeptides of the invention are preferably localized at the plasmodesmata of plant cells.

[0278] Furthermore, bHLH12-like polypeptides (at least in their native form) typically have DNA binding activity. Tools and techniques for measuring DNA binding activity are well known in the art, for example in Dombrecht et al. (2007) Plant Cell 19, 2225-2245, 2007.

[0279] Preferably, the bHLH12-like polypeptide of the invention binds a promoter comprising an E-box motif. E-box motifs are DNA motifs well known in the art and comprising a variation of the palindromic hexanucleotide sequence represented by CANNTG (SEQ ID NO: 408). Method to assay biding to the E-box in a promoter are well known in the art.

[0280] In addition, bHLH12-like polypeptides, when expressed in rice according to the methods of the present invention as outlined in The Examples section, give plants having increased yield related traits, preferably any one selected from increased thousand kernel weight, increased gravity centre of the canopy, and altered, preferably increased, root/shoot biomass ratio.

[0281] Additionally, bHLH12-like polypeptides may display a preferred subcellular localization, typically one or more of nuclear, cytoplasm, chloroplastic, or mitochondrial. The task of protein subcellular localisation prediction is important and well studied. Knowing a protein's localisation helps elucidate its function. Experimental methods for protein localization range from immunolocalization to tagging of proteins using green fluorescent protein (GFP) or beta-glucuronidase (GUS). Such methods are accurate although labor-intensive compared with computational methods. Recently much progress has been made in computational prediction of protein localisation from sequence data. Among algorithms well known to a person skilled in the art are available at the ExPASy Proteomics tools hosted by the Swiss

[0282] Institute for Bioinformatics, for example, PSort, TargetP, ChloroP, LocTree, Predotar, LipoP, MITOPROT, PATS, PTS1, SignalP, TMHMM, and others. bHLH12-like polypeptides of the invention are preferably localized at the nucleus of plant cells.

[0283] Furthermore, ADH2 polypeptides (at least in their native form) typically have S-nitrosoglutathione reductase (GSNOR) activity. Tools and techniques for measuring GSNOR activity are well known in the art. See Rusterucci et al., 2007.

[0284] In addition, ADH2 polypeptides, when expressed in rice according to the methods of the present invention as outlined in the Examples section, give plants having increased yield related traits, in particular increased seed yield.

[0285] Furthermore, GCN5-like polypeptide (at least in their native form) typically have a regulation of floral meristem activity. Tools and techniques for measuring floral meristem activity are well known in the art.

[0286] In addition, GCN5-like polypeptide, when expressed in rice according to the methods of the present invention as outlined in Examples 7 and 8, give plants having increased yield related traits, in particular seed yield and also biomass.

[0287] Additionally, GCN5-like polypeptide may display a preferred subcellular localization, typically one or more of nuclear, citoplasmic, chloroplastic, or mitochondrial. The task of protein subcellular localisation prediction is important and well studied. Knowing a protein's localisation helps elucidate its function. Experimental methods for protein localization range from immunolocalization to tagging of proteins using green fluorescent protein (GFP) or beta-glucuronidase (GUS). Such methods are accurate although labor-intensive compared with computational methods. Recently much progress has been made in computational prediction of protein localisation from sequence data. Among algorithms well known to a person skilled in the art are available at the ExPASy Proteomics tools hosted by the Swiss Institute for Bioinformatics, for example, PSort, TargetP, ChloroP, LocTree, Predotar, LipoP, MITOPROT, PATS, PTS1, SignalP, TMHMM, and others.

[0288] Concerning LDOX polypeptides, the present invention is illustrated by transforming plants with the nucleic acid sequence represented by SEQ ID NO: 1, encoding the polypeptide sequence of SEQ ID NO: 2. However, performance of the invention is not restricted to these sequences; the methods of the invention may advantageously be performed using any LDOX-encoding nucleic acid or LDOX polypeptide as defined herein.

[0289] Examples of nucleic acids encoding LDOX polypeptides are given in Table A1 of the Examples section herein. Such nucleic acids are useful in performing the methods of the invention. The amino acid sequences given in Table A1 of the Examples section are example sequences of orthologues and paralogues of the LDOX polypeptide represented by SEQ ID NO: 2, the terms “orthologues” and “paralogues” being as defined herein. Further orthologues and paralogues may readily be identified by performing a so-called reciprocal blast search. Typically, this involves a first BLAST involving BLASTing a query sequence (for example using any of the sequences listed in Table A1 of the Examples section) against any sequence database, such as the publicly available NCBI database. BLASTN or TBLASTX (using standard default values) are generally used when starting from a nucleotide sequence, and BLASTP or TBLASTN (using standard default values) when starting from a protein sequence. The BLAST results may optionally be filtered. The full-length sequences of either the filtered results or non-filtered results are then BLASTed back (second BLAST) against sequences from the organism from which the query sequence is derived (where the query sequence is SEQ ID NO: 1 or SEQ ID NO: 2, the second BLAST would therefore be against Arabidopsis thaliana sequences). The results of the first and second BLASTs are then compared. A paralogue is identified if a high-ranking hit from the first blast is from the same species as from which the query sequence is derived, a BLAST back then ideally results in the query sequence amongst the highest hits; an orthologue is identified if a high-ranking hit in the first BLAST is not from the same species as from which the query sequence is derived, and preferably results upon BLAST back in the query sequence being among the highest hits.

[0290] Concerning YRP5 polypeptides, the present invention may be performed, for example, by transforming plants with the nucleic acid sequence represented by any of SEQ ID NO: 185 encoding the polypeptide sequence of SEQ ID NO: 186, or SEQ ID NO: 187 encoding the polypeptide sequence of SEQ ID NO: 4. However, performance of the invention is not restricted to these sequences; the methods of the invention may advantageously be performed using any YRP5-encoding nucleic acid or YRP5 polypeptide as defined herein.

[0291] Examples of nucleic acids encoding YRP5 polypeptides are given in Table A2 of the Examples section herein. Such nucleic acids are useful in performing the methods of the invention. Orthologues and paralogues of the amino acid sequences given in Table A2 may be readily obtained using routine tools and techniques, such as a reciprocal blast search. Typically, this involves a first BLAST involving BLASTing a query sequence (for example using any of the sequences listed in Table A2 of the Examples section) against any sequence database, such as the publicly available NCBI database. BLASTN or TBLASTX (using standard default values) are generally used when starting from a nucleotide sequence, and BLASTP or TBLASTN (using standard default values) when starting from a protein sequence. The BLAST results may optionally be filtered. The full-length sequences of either the filtered results or non-filtered results are then BLASTed back (second BLAST) against sequences from the organism from which the query sequence is derived (where the query sequence is SEQ ID NO: 185 or SEQ ID NO: 186, the second BLAST would therefore be against Populus trichocarpa sequences; where the query sequence is SEQ ID NO: 187 or SEQ ID NO: 188, the second BLAST would therefore be against Arabidopsis thaliana). The results of the first and second BLASTs are then compared. A paralogue is identified if a high-ranking hit from the first blast is from the same species as from which the query sequence is derived, a BLAST back then ideally results in the query sequence amongst the highest hits; an orthologue is identified if a high-ranking hit in the first BLAST is not from the same species as from which the query sequence is derived, and preferably results upon BLAST back in the query sequence being among the highest hits.

[0292] Concerning CK1 polypeptides, the present invention is illustrated by transforming plants with the nucleic acid sequence represented by SEQ ID NO: 194, encoding the polypeptide sequence of SEQ ID NO: 195. However, performance of the invention is not restricted to these sequences; the methods of the invention may advantageously be performed using any CK1-encoding nucleic acid or CK1 polypeptide as defined herein.

[0293] Examples of nucleic acids encoding CK1 polypeptides are given in Table A3 of the Examples section herein. Such nucleic acids are useful in performing the methods of the invention. The amino acid sequences given in Table A3 of the Examples section are example sequences of orthologues and paralogues of the CK1 polypeptide represented by SEQ ID NO: 195, the terms “orthologues” and “paralogues” being as defined herein. Further orthologues and paralogues may readily be identified by performing a so-called reciprocal blast search. Typically, this involves a first BLAST involving BLASTing a query sequence (for example using any of the sequences listed in Table A3 of the Examples section) against any sequence database, such as the publicly available NCBI database. BLASTN or TBLASTX (using standard default values) are generally used when starting from a nucleotide sequence, and BLASTP or TBLASTN (using standard default values) when starting from a protein sequence. The BLAST results may optionally be filtered. The full-length sequences of either the filtered results or non-filtered results are then BLASTed back (second BLAST) against sequences from the organism from which the query sequence is derived (where the query sequence is SEQ ID NO: 194 or SEQ ID NO: 195, the second BLAST would therefore be against Arabidopsis sequences). The results of the first and second BLASTs are then compared. A paralogue is identified if a high-ranking hit from the first blast is from the same species as from which the query sequence is derived, a BLAST back then ideally results in the query sequence amongst the highest hits; an orthologue is identified if a high-ranking hit in the first BLAST is not from the same species as from which the query sequence is derived, and preferably results upon BLAST back in the query sequence being among the highest hits.

[0294] Concerning bHLH12-like polypeptides, the present invention is illustrated by transforming plants with the nucleic acid sequence represented by SEQ ID NO: 279, encoding the polypeptide sequence of SEQ ID NO: 280. However, performance of the invention is not restricted to these sequences; the methods of the invention may advantageously be performed using any bHLH12-like-encoding nucleic acid or bHLH12-like polypeptide as defined herein.

[0295] Examples of nucleic acids encoding bHLH12-like polypeptides are given in Table A4 of the Examples section herein. Such nucleic acids are useful in performing the methods of the invention. The amino acid sequences given in Table A4 of the Examples section are example sequences of orthologues and paralogues of the bHLH12-like polypeptide represented by SEQ ID NO: 280, the terms “orthologues” and “paralogues” being as defined herein. Further orthologues and paralogues may readily be identified by performing a so-called reciprocal blast search. Typically, this involves a first BLAST involving BLASTing a query sequence (for example using any of the sequences listed in Table A4 of the Examples section) against any sequence database, such as the publicly available NCBI database. BLASTN or TBLASTX (using standard default values) are generally used when starting from a nucleotide sequence, and BLASTP or TBLASTN (using standard default values) when starting from a protein sequence. The BLAST results may optionally be filtered. The full-length sequences of either the filtered results or non-filtered results are then BLASTed back (second BLAST) against sequences from the organism from which the query sequence is derived (where the query sequence is SEQ ID NO: 279 or SEQ ID NO: 280, the second BLAST would therefore be against Populus trichocarpa sequences). The results of the first and second BLASTs are then compared. A paralogue is identified if a high-ranking hit from the first blast is from the same species as from which the query sequence is derived, a BLAST back then ideally results in the query sequence amongst the highest hits; an orthologue is identified if a high-ranking hit in the first BLAST is not from the same species as from which the query sequence is derived, and preferably results upon BLAST back in the query sequence being among the highest hits.

[0296] Concerning ADH2 polypeptides, the present invention is illustrated by transforming plants with the nucleic acid sequence represented by SEQ ID NO: 412 or SEQ ID NO: 414, encoding the polypeptide sequence of SEQ ID NO: 413 or SEQ ID NO: 415. However, performance of the invention is not restricted to these sequences; the methods of the invention may advantageously be performed using any ADH2-encoding nucleic acid or ADH2 polypeptide as defined herein.

[0297] Examples of nucleic acids encoding ADH2 polypeptides are given in Table A5 of the Examples section herein. Such nucleic acids are useful in performing the methods of the invention. The amino acid sequences given in Table A5 of the Examples section are example sequences of orthologues and paralogues of the ADH2 polypeptide represented by SEQ ID NO: 413, the terms “orthologues” and “paralogues” being as defined herein. Further orthologues and paralogues may readily be identified by performing a so-called reciprocal blast search. Typically, this involves a first BLAST involving BLASTing a query sequence (for example using any of the sequences listed in Table A5 of the Examples section) against any sequence database, such as the publicly available NCBI database. BLASTN or TBLASTX (using standard default values) are generally used when starting from a nucleotide sequence, and BLASTP or TBLASTN (using standard default values) when starting from a protein sequence. The BLAST results may optionally be filtered. The full-length sequences of either the filtered results or non-filtered results are then BLASTed back (second BLAST) against sequences from the organism from which the query sequence is derived (where the query sequence is SEQ ID NO: 412, SEQ ID NO: 413, SEQ ID NO: 414 or SEQ ID NO: 415 the second BLAST would therefore be against Saccharum sequences). The results of the first and second BLASTs are then compared. A paralogue is identified if a high-ranking hit from the first blast is from the same species as from which the query sequence is derived, a BLAST back then ideally results in the query sequence amongst the highest hits; an orthologue is identified if a high-ranking hit in the first BLAST is not from the same species as from which the query sequence is derived, and preferably results upon BLAST back in the query sequence being among the highest hits.

[0298] Concerning GCN5 polypeptides, the present invention is illustrated by transforming plants with the nucleic acid sequence represented by SEQ ID NO: 459, encoding the polypeptide sequence of SEQ ID NO: 460. However, performance of the invention is not restricted to these sequences; the methods of the invention may advantageously be performed using any GCN5-like polypeptide encoding nucleic acid or GCN5-like polypeptide as defined herein.

[0299] Examples of nucleic acids encoding GCN5-like polypeptide are given in Table A6 of the Examples section herein. Such nucleic acids are useful in performing the methods of the invention. The amino acid sequences given in Table A6 of the Examples section are example sequences of orthologues and paralogues of the GCN5-like polypeptide represented by SEQ ID NO: 460, the terms “orthologues” and “paralogues” being as defined herein. Further orthologues and paralogues may readily be identified by performing a so-called reciprocal blast search. Typically, this involves a first BLAST involving BLASTing a query sequence (for example using any of the sequences listed in Table A6 of the Examples section) against any sequence database, such as the publicly available NCBI database. BLASTN or TBLASTX (using standard default values) are generally used when starting from a nucleotide sequence, and BLASTP or TBLASTN (using standard default values) when starting from a protein sequence. The BLAST results may optionally be filtered. The full-length sequences of either the filtered results or non-filtered results are then BLASTed back (second BLAST) against sequences from the organism from which the query sequence is derived. The results of the first and second BLASTs are then compared. A paralogue is identified if a high-ranking hit from the first blast is from the same species as from which the query sequence is derived, a BLAST back then ideally results in the query sequence amongst the highest hits; an orthologue is identified if a high-ranking hit in the first BLAST is not from the same species as from which the query sequence is derived, and preferably results upon BLAST back in the query sequence being among the highest hits.

[0300] High-ranking hits are those having a low E-value. The lower the E-value, the more significant the score (or in other words the lower the chance that the hit was found by chance). Computation of the E-value is well known in the art. In addition to E-values, comparisons are also scored by percentage identity. Percentage identity refers to the number of identical nucleotides (or amino acids) between the two compared nucleic acid (or polypeptide) sequences over a particular length. In the case of large families, ClustaiW may be used, followed by a neighbour joining tree, to help visualize clustering of related genes and to identify orthologues and paralogues.

[0301] The task of protein subcellular localisation prediction is important and well studied. Knowing a protein's localisation helps elucidate its function. Experimental methods for protein localization range from immunolocalization to tagging of proteins using green fluorescent protein (GFP) or beta-glucuronidase (GUS). Such methods are accurate although labor-intensive compared with computational methods. Recently much progress has been made in computational prediction of protein localisation from sequence data. Among algorithms well known to a person skilled in the art are available at the ExPASy Proteomics tools hosted by the Swiss Institute for Bioinformatics, for example, PSort, TargetP, ChloroP, LocTree, Predotar, LipoP, MITOPROT, PATS, PTS1, SignalP, TMHMM, and others.

[0302] Nucleic acid variants may also be useful in practising the methods of the invention. Examples of such variants include nucleic acids encoding homologues and derivatives of any one of the amino acid sequences given in Table A1 to A6 of the Examples section, the terms “homologue” and “derivative” being as defined herein. Also useful in the methods of the invention are nucleic acids encoding homologues and derivatives of orthologues or paralogues of any one of the amino acid sequences given in Table A1 to A6 of the Examples section. Homologues and derivatives useful in the methods of the present invention have substantially the same biological and functional activity as the unmodified protein from which they are derived. Further variants useful in practising the methods of the invention are variants in which codon usage is optimised or in which miRNA target sites are removed.

[0303] Further nucleic acid variants useful in practising the methods of the invention include portions of nucleic acids encoding LDOX polypeptides, or YRP5 polypeptides, or CK1 polypeptides, or bHLH12-like polypeptides, or ADH2 polypeptides, or GCN5-like polypeptides, nucleic acids hybridising to nucleic acids encoding LDOX polypeptides, or YRP5 polypeptides, or CK1 polypeptides, or bHLH12-like polypeptides, or ADH2 polypeptides, or GCN5-like polypeptides, splice variants of nucleic acids encoding LDOX polypeptides, or YRP5 polypeptides, or CK1 polypeptides, or bHLH12-like polypeptides, or ADH2 polypeptides, or GCN5-like polypeptides, allelic variants of nucleic acids encoding LDOX polypeptides, or YRP5 polypeptides, or CK1 polypeptides, or bHLH12-like polypeptides, or ADH2 polypeptides, or GCN5-like polypeptides, and variants of nucleic acids encoding LDOX polypeptides, or YRP5 polypeptides, or CK1 polypeptides, or bHLH12-like polypeptides, or ADH2 polypeptides, or GCN5-like polypeptides, obtained by gene shuffling. The terms hybridising sequence, splice variant, allelic variant and gene shuffling are as described herein.

[0304] Nucleic acids encoding LDOX polypeptides, or YRP5 polypeptides, or CK1 polypeptides, or bHLH12-like polypeptides, or ADH2 polypeptides, or GCN5-like polypeptides, need not be full-length nucleic acids, since performance of the methods of the invention does not rely on the use of full-length nucleic acid sequences. According to the present invention, there is provided a method for enhancing yield-related traits in plants, comprising introducing and expressing in a plant a portion of any one of the nucleic acid sequences given in Table A1 to A6 of the Examples section, or a portion of a nucleic acid encoding an orthologue, paralogue or homologue of any of the amino acid sequences given in Table A1 to A6 of the Examples section.

[0305] A portion of a nucleic acid may be prepared, for example, by making one or more deletions to the nucleic acid. The portions may be used in isolated form or they may be fused to other coding (or non-coding) sequences in order to, for example, produce a protein that combines several activities. When fused to other coding sequences, the resultant polypeptide produced upon translation may be bigger than that predicted for the protein portion.

[0306] Concerning LDOX polypeptides, portions useful in the methods of the invention, encode a LDOX polypeptide as defined herein, and have substantially the same biological activity as the amino acid sequences given in Table A1 of the Examples section. Preferably, the portion is a portion of any one of the nucleic acids given in Table A1 of the Examples section, or is a portion of a nucleic acid encoding an orthologue or paralogue of any one of the amino acid sequences given in Table A1 of the Examples section. Preferably the portion is at least 500, 550, 600, 650, 700, 750, 800, 850, 900, 950, 1000, 1050, 1100 consecutive nucleotides in length, the consecutive nucleotides being of any one of the nucleic acid sequences given in Table A1 of the Examples section, or of a nucleic acid encoding an orthologue or paralogue of any one of the amino acid sequences given in Table A1 of the Examples section. Most preferably the portion is a portion of the nucleic acid of SEQ ID NO: 1. Preferably, the portion encodes a fragment of an amino acid sequence which, when used in the construction of a phylogenetic tree, such as the one depicted in FIG. 4, clusters within the group of LDOX polypeptides rather than with any other group; more preferably, the polypeptide sequence clusters within the subgroup A of the LDOX polypeptides comprising the amino acid sequence represented by SEQ ID NO: 2.

[0307] Concerning YRP5 polypeptides, portions useful in the methods of the invention, encode a YRP5 polypeptide as defined herein, and have substantially the same biological activity as the amino acid sequences given in Table A2 of the Examples section. Preferably, the portion is a portion of any one of the nucleic acids given in Table A2 of the Examples section, or is a portion of a nucleic acid encoding an orthologue or paralogue of any one of the amino acid sequences given in Table A2 of the Examples section. Preferably the portion is at least 1850, 1900, 1950, 2000, 2050, 2100, 2150, 2200, 2250, 2300, 2350, 2400, 2450, 2500, 2550, 2600, 2650, 2700, 2750, 2800, 2850, 2900, 2950, 3000, 3050, 3100, 3150, 3200, 3250, 3300, 3350, 3400, 3450, 3500, 3550, 3600, 3650, or more consecutive nucleotides in length, the consecutive nucleotides being of any one of the nucleic acid sequences given in Table A2 of the Examples section, or of a nucleic acid encoding an orthologue or paralogue of any one of the amino acid sequences given in Table A2 of the Examples section. Most preferably the portion is a portion of the nucleic acid of SEQ ID NO: 185 or SEQ ID NO: 187. Preferably, the portion encodes a fragment of an amino acid sequence which, when used in the construction of a phylogenetic tree, clusters with the group of YRP5 polypeptides comprising the amino acid sequence represented by SEQ ID NO: 186 or SEQ ID NO: 188, rather than with any other group.

[0308] Concerning CK1 polypeptides, portions useful in the methods of the invention, encode a CK1 polypeptide as defined herein, and have substantially the same biological activity as the amino acid sequences given in Table A3 of the Examples section. Preferably, the portion is a portion of any one of the nucleic acids given in Table A3 of the Examples section, or is a portion of a nucleic acid encoding an orthologue or paralogue of any one of the amino acid sequences given in Table A3 of the Examples section. Preferably the portion is at least 100, 200, 300, 400, 500, 550, 600, 650, 700, 750, 800, 850, 900, 950, 1000 consecutive nucleotides in length, the consecutive nucleotides being of any one of the nucleic acid sequences given in Table A3 of the Examples section, or of a nucleic acid encoding an orthologue or paralogue of any one of the amino acid sequences given in Table A3 of the Examples section. Most preferably the portion is a portion of the nucleic acid of SEQ ID NO: 194. Preferably, the portion encodes a fragment of a protein having in increasing order of preference at least 25%, 26%, 27%, 28%, 29%, 30%, 31%, 32%, 33%, 34%, 35%, 36%, 37%, 38%, 39%, 40%, 41%, 42%, 43%, 44%, 45%, 46%, 47%, 48%, 49%, 50%, 51%, 52%, 53%, 54%, 55%, 56%, 57%, 58%, 59%, 60%, 61%, 62%, 63%, 64%, 65%, 66%, 67%, 68%, 69%, 70%, 71%, 72%, 73%, 74%, 75%, 76%, 77%, 78%, 79%, 80%, 81%, 82%, 83%, 84%, 85%, 86%, 87%, 88%, 89%, 90%, 91%, 92%, 93%, 94%, 95%, 96%, 97%, 98%, or 99% sequence identity to the amino acid represented by any of the polypeptides of Table A3, preferably by SEQ ID NO: 2.

[0309] Concerning bHLH12-like polypeptides, portions useful in the methods of the invention, encode a bHLH12-like polypeptide as defined herein, and have substantially the same biological activity as the amino acid sequences given in Table A4 of the Examples section. Preferably, the portion is a portion of any one of the nucleic acids given in Table A4 of the Examples section, or is a portion of a nucleic acid encoding an orthologue or paralogue of any one of the amino acid sequences given in Table A4 of the Examples section. Preferably the portion is at least 100, 200, 300, 400, 500, 550, 600, 650, 700, 750, 800, 850, 900, 950, 1000 consecutive nucleotides in length, the consecutive nucleotides being of any one of the nucleic acid sequences given in Table A4 of the Examples section, or of a nucleic acid encoding an orthologue or paralogue of any one of the amino acid sequences given in Table A4 of the Examples section. Most preferably the portion is a portion of the nucleic acid of SEQ ID NO: 279 or SEQ ID NO: 295. Preferably, the portion encodes a polypeptide which when used in the construction of a phylogenetic tree, constructed with the polypeptide sequences referred to in FIG. 4 of Heim et al. (2003), clusters with any of the polypeptides of the Group XII in FIG. 4 of Heim et al. (2003), preferably within BEE3, rather than with any other group.

[0310] Concerning ADH2 polypeptides, portions useful in the methods of the invention, encode an ADH2 polypeptide as defined herein, and have substantially the same biological activity as the amino acid sequences given in Table A5 of the Examples section. Preferably, the portion is a portion of any one of the nucleic acids given in Table A5 of the Examples section, or is a portion of a nucleic acid encoding an orthologue or paralogue of any one of the amino acid sequences given in Table A5 of the Examples section. Preferably the portion is in increasing order of preference at least 500, 550, 600, 650, 700, 750, 800, 850, 900, 950, 1000 or more consecutive nucleotides in length, the consecutive nucleotides being of any one of the nucleic acid sequences given in Table A5 of the Examples section, or of a nucleic acid encoding an orthologue or paralogue of any one of the amino acid sequences given in Table A5 of the Examples section. Most preferably the portion is a portion of the nucleic acid of SEQ ID NO: 412 or SEQ ID NO: 414. Preferably, the portion encodes a fragment of an amino acid sequence which, when used in the construction of a phylogenetic tree, such as the one depicted in FIG. 12, clusters with the group of ADH2 polypeptides comprising the amino acid sequence represented by SEQ ID NO: 413 or SEQ ID NO: 415 rather than with any other group.

[0311] Concerning GCN5 polypeptides, portions useful in the methods of the invention, encode a GCN5-like polypeptide as defined herein, and have substantially the same biological activity as the amino acid sequences given in Table A6 of the Examples section. Preferably, the portion is a portion of any one of the nucleic acids given in Table A6 of the Examples section, or is a portion of a nucleic acid encoding an orthologue or paralogue of any one of the amino acid sequences given in Table A6 of the Examples section. Preferably the portion is at least 500, 550, 600, 650, 700, 750, 800, 850, 900, 950, 1000 consecutive nucleotides in length, the consecutive nucleotides being of any one of the nucleic acid sequences given in Table A6 of the Examples section, or of a nucleic acid encoding an orthologue or paralogue of any one of the amino acid sequences given in Table A6 of the Examples section. Most preferably the portion is a portion of the nucleic acid of SEQ ID NO: 459. Preferably, the portion encodes a fragment of an amino acid sequence which, when used in the construction of a phylogenetic tree, such as the one depicted in FIG. 15, clusters with the group of GCN5-like polypeptide comprising the amino acid sequence represented by SEQ ID NO: 460 rather than with any other group.

[0312] Another nucleic acid variant useful in the methods of the invention is a nucleic acid capable of hybridising, under reduced stringency conditions, preferably under stringent conditions, with a nucleic acid encoding an LDOX polypeptide, or a YRP5 polypeptide, or a CK1 polypeptide, or a bHLH12-like polypeptide, or an ADH2 polypeptide, or a GCN5-like polypeptide, as defined herein, or with a portion as defined herein.

[0313] According to the present invention, there is provided a method for enhancing yield-related traits in plants, comprising introducing and expressing in a plant a nucleic acid capable of hybridising to any one of the nucleic acids given in Table A1 to A6 of the Examples section, or comprising introducing and expressing in a plant a nucleic acid capable of hybridising to a nucleic acid encoding an orthologue, paralogue or homologue of any of the nucleic acid sequences given in Table A1 to A6 of the Examples section.

[0314] Concerning LDOX polypeptides, hybridising sequences useful in the methods of the invention encode a LDOX polypeptide as defined herein, having substantially the same biological activity as the amino acid sequences given in Table A1 of the Examples section. Preferably, the hybridising sequence is capable of hybridising to the complement of any one of the nucleic acids given in Table A1 of the Examples section, or to a portion of any of these sequences, a portion being as defined above, or the hybridising sequence is capable of hybridising to the complement of a nucleic acid encoding an orthologue or paralogue of any one of the amino acid sequences given in Table A1 of the Examples section. Most preferably, the hybridising sequence is capable of hybridising to the complement of a nucleic acid as represented by SEQ ID NO: 1 or to a portion thereof.

[0315] Preferably, the hybridising sequence encodes a polypeptide with an amino acid sequence which, when full-length and used in the construction of a phylogenetic tree, such as the one depicted in FIG. 4, clusters within the group of LDOX polypeptides rather than with any other group; more preferably, the polypeptide sequence clusters within the subgroup A of the LDOX polypeptides comprising the amino acid sequence represented by SEQ ID NO: 2.

[0316] Concerning YRP5 polypeptides, hybridising sequences useful in the methods of the invention encode a YRP5 polypeptide as defined herein, having substantially the same biological activity as the amino acid sequences given in Table A2 of the Examples section. Preferably, the hybridising sequence is capable of hybridising to the complement of any one of the nucleic acids given in Table A2, or to a portion of any of these sequences, a portion being as defined above, or the hybridising sequence is capable of hybridising to the complement of a nucleic acid encoding an orthologue or paralogue of any one of the amino acid sequences given in Table A2. Most preferably, the hybridising sequence is capable of hybridising to the complement of a nucleic acid as represented by SEQ ID NO: 185 or SEQ ID NO: 187 or to a portion thereof.

[0317] Preferably, the hybridising sequence encodes a polypeptide with an amino acid sequence which, when full-length and used in the construction of a phylogenetic tree, clusters with the group of YRP5 polypeptides comprising the amino acid sequence represented by SEQ ID NO: 186 or SEQ ID NO: 188 rather than with any other group.

[0318] Concerning CK1 polypeptides, hybridising sequences useful in the methods of the invention encode a CK1 polypeptide as defined herein, having substantially the same biological activity as the amino acid sequences given in Table A3 of the Examples section. Preferably, the hybridising sequence is capable of hybridising to the complement of any one of the nucleic acids given in Table A3 of the Examples section, or to a portion of any of these sequences, a portion being as defined above, or the hybridising sequence is capable of hybridising to the complement of a nucleic acid encoding an orthologue or paralogue of any one of the amino acid sequences given in Table A3 of the Examples section. Most preferably, the hybridising sequence is capable of hybridising to the complement of a nucleic acid as represented by SEQ ID NO: 194 or to a portion thereof.

[0319] Preferably, the hybridising sequence encodes a protein having in increasing order of preference at least 25%, 26%, 27%, 28%, 29%, 30%, 31%, 32%, 33%, 34%, 35%, 36%, 37%, 38%, 39%, 40%, 41%, 42%, 43%, 44%, 45%, 46%, 47%, 48%, 49%, 50%, 51%, 52%, 53%, 54%, 55%, 56%, 57%, 58%, 59%, 60%, 61%, 62%, 63%, 64%, 65%, 66%, 67%, 68%, 69%, 70%, 71%, 72%, 73%, 74%, 75%, 76%, 77%, 78%, 79%, 80%, 81%, 82%, 83%, 84%, 85%, 86%, 87%, 88%, 89%, 90%, 91%, 92%, 93%, 94%, 95%, 96%, 97%, 98%, or 99% sequence identity to the amino acid represented by any of the polypeptides of Table A3, preferably by SEQ ID NO: 195.

[0320] Concerning bHLH12-like polypeptides, hybridising sequences useful in the methods of the invention encode a bHLH12-like polypeptide as defined herein, having substantially the same biological activity as the amino acid sequences given in Table A4 of the Examples section. Preferably, the hybridising sequence is capable of hybridising to the complement of any one of the nucleic acids given in Table A4 of the Examples section, or to a portion of any of these sequences, a portion being as defined above, or the hybridising sequence is capable of hybridising to the complement of a nucleic acid encoding an orthologue or paralogue of any one of the amino acid sequences given in Table A4 of the Examples section. Most preferably, the hybridising sequence is capable of hybridising to the complement of a nucleic acid as represented by SEQ ID NO: 279 or to a portion thereof.

[0321] Preferably, the hybridising sequence encodes a protein which when used in the construction of a phylogenetic tree, constructed with the polypeptide sequence referred to in FIG. 4 of Heim et al. (2003), clusters with any of the polypeptides of the Group XII in FIG. 4 of Heim et al. (2003), preferably within BEE3, rather than with any other group.

[0322] Concerning ADH2 polypeptides, hybridising sequences useful in the methods of the invention encode an ADH2 polypeptide as defined herein, having substantially the same biological activity as the amino acid sequences given in Table A5 of the Examples section.

[0323] Preferably, the hybridising sequence is capable of hybridising to the complement of any one of the nucleic acids given in Table A5 of the Examples section, or to a portion of any of these sequences, a portion being as defined above, or the hybridising sequence is capable of hybridising to the complement of a nucleic acid encoding an orthologue or paralogue of any one of the amino acid sequences given in Table A5 of the Examples section. Most preferably, the hybridising sequence is capable of hybridising to the complement of a nucleic acid as represented by SEQ ID NO: 412 or SEQ ID NO: 414 or to a portion thereof.

[0324] Preferably, the hybridising sequence encodes a polypeptide with an amino acid sequence which, when full-length and used in the construction of a phylogenetic tree, such as the one depicted in FIG. 12, clusters with the group of ADH2 polypeptides comprising the amino acid sequence represented by SEQ ID NO: 413 or SEQ ID NO: 415 rather than with any other group.

[0325] Concerning GCN5 polypeptides, hybridising sequences useful in the methods of the invention encode a GCN5-like polypeptide as defined herein, having substantially the same biological activity as the amino acid sequences given in Table A6 of the Examples section. Preferably, the hybridising sequence is capable of hybridising to the complement of any one of the nucleic acids given in Table A6 of the Examples section, or to a portion of any of these sequences, a portion being as defined above, or the hybridising sequence is capable of hybridising to the complement of a nucleic acid encoding an orthologue or paralogue of any one of the amino acid sequences given in Table A6 of the Examples section. Most preferably, the hybridising sequence is capable of hybridising to the complement of a nucleic acid as represented by SEQ ID NO: 459 or to a portion thereof.

[0326] Preferably, the hybridising sequence encodes a polypeptide with an amino acid sequence which, when full-length and used in the construction of a phylogenetic tree, such as the one depicted in FIG. 15, clusters with the group of GCN5-like polypeptide comprising the amino acid sequence represented by SEQ ID NO: 460 rather than with any other group.

[0327] Another nucleic acid variant useful in the methods of the invention is a splice variant encoding an LDOX polypeptide, or a YRP5 polypeptide, or a CK1 polypeptide, or a bHLH12-like polypeptide, or an ADH2 polypeptide, or a GCN5-like polypeptide, as defined hereinabove, a splice variant being as defined herein.

[0328] Concerning LDOX polypeptides, or CK1 polypeptides, or bHLH12-like polypeptides, or ADH2 polypeptides, or GCN5-like polypeptides, according to the present invention, there is provided a method for enhancing yield-related traits in plants, comprising introducing and expressing in a plant a splice variant of any one of the nucleic acid sequences given in Table A1, or Table A3, or Table A4, or Table A5, or Table A6 of the Examples section, or a splice variant of a nucleic acid encoding an orthologue, paralogue or homologue of any of the amino acid sequences given in Table A1, or Table A3, or Table A4, or Table A5, or Table A6 of the Examples section.

[0329] Concerning YRP5 polypeptides, according to the present invention, there is provided a method for enhancing abiotic stress tolerance in plants, comprising introducing and expressing in a plant a splice variant of any one of the nucleic acid sequences given in Table A2, or a splice variant of a nucleic acid encoding an orthologue, paralogue or homologue of any of the amino acid sequences given in Table A2 of the Examples section.

[0330] Concerning LDOX polypeptides, preferred splice variants are splice variants of a nucleic acid represented by SEQ ID NO: 1, or a splice variant of a nucleic acid encoding an orthologue or paralogue of SEQ ID NO: 2. Preferably, the amino acid sequence encoded by the splice variant, when used in the construction of a phylogenetic tree, such as the one depicted in FIG. 4, clusters within the group of LDOX polypeptides rather than with any other group; more preferably, the polypeptide sequence clusters within the subgroup A of the LDOX polypeptides comprising the amino acid sequence represented by SEQ ID NO: 2.

[0331] Concerning YRP5 polypeptides, preferred splice variants are splice variants of a nucleic acid represented by any of SEQ ID NO: 185 or SEQ ID NO: 187, or a splice variant of a nucleic acid encoding an orthologue or paralogue of any of SEQ ID NO: 186 or SEQ ID NO:188. Preferably, the amino acid sequence encoded by the splice variant, when used in the construction of a phylogenetic tree, clusters with the group of YRP5 polypeptides comprising the amino acid sequence represented by SEQ ID NO: 186 or SEQ ID NO: 188 rather than with any other group.

[0332] Concerning CK1 polypeptides, preferred splice variants are splice variants of a nucleic acid represented by SEQ ID NO: 194, or a splice variant of a nucleic acid encoding an orthologue or paralogue of SEQ ID NO: 195. Preferably, the amino acid sequence encoded by the splice variant has in increasing order of preference at least 25%, 26%, 27%, 28%, 29%, 30%, 31%, 32%, 33%, 34%, 35%, 36%, 37%, 38%, 39%, 40%, 41%, 42%, 43%, 44%, 45%, 46%, 47%, 48%, 49%, 50%, 51%, 52%, 53%, 54%, 55%, 56%, 57%, 58%, 59%, 60%, 61%, 62%, 63%, 64%, 65%, 66%, 67%, 68%, 69%, 70%, 71%, 72%, 73%, 74%, 75%, 76%, 77%, 78%, 79%, 80%, 81%, 82%, 83%, 84%, 85%, 86%, 87%, 88%, 89%, 90%, 91%, 92%, 93%, 94%, 95%, 96%, 97%, 98%, or 99% sequence identity to the amino acid represented by any of the polypeptides of Table A3, preferably by SEQ ID NO: 195.

[0333] Concerning bHLH12-like polypeptides, preferred splice variants are splice variants of a nucleic acid represented by SEQ ID NO: 279, or a splice variant of a nucleic acid encoding an orthologue or paralogue of SEQ ID NO: 280. Preferably, the amino acid sequence encoded by the splice variant when used in the construction of a phylogenetic tree, constructed with the polypeptide sequences referred to in FIG. 4 of Heim et al. (2003), clusters with any of the polypeptides of the Group XII in FIG. 4 of Heim et al. (2003), preferably within BEE3, rather than with any other group.

[0334] Concerning ADH2 polypeptides, Preferred splice variants are splice variants of a nucleic acid represented by SEQ ID NO: 412 or SEQ ID NO: 414, or a splice variant of a nucleic acid encoding an orthologue or paralogue of SEQ ID NO: 413 or SEQ ID NO: 415. Preferably, the amino acid sequence encoded by the splice variant, when used in the construction of a phylogenetic tree, such as the one depicted in FIG. 12, clusters with the group of ADH2 polypeptides comprising the amino acid sequence represented by SEQ ID NO: 413 or SEQ ID NO: 415 rather than with any other group.

[0335] Concerning GCN5 polypeptides, preferred splice variants are splice variants of a nucleic acid represented by SEQ ID NO: 459, or a splice variant of a nucleic acid encoding an orthologue or paralogue of SEQ ID NO: 460. Preferably, the amino acid sequence encoded by the splice variant, when used in the construction of a phylogenetic tree, such as the one depicted in FIG. 15, clusters with the group of GCN5-like polypeptide comprising the amino acid sequence represented by SEQ ID NO: 460 rather than with any other group.

[0336] Another nucleic acid variant useful in performing the methods of the invention is an allelic variant of a nucleic acid encoding an LDOX polypeptide, or a YRP5 polypeptide, or a CK1 polypeptide, or a bHLH12-like polypeptide, or an ADH2 polypeptide, or a GCN5-like polypeptide, as defined hereinabove, an allelic variant being as defined herein.

[0337] Concerning LDOX polypeptides, or CK1 polypeptides, or bHLH12-like polypeptides, or ADH2 polypeptides, or GCN5-like polypeptides, according to the present invention, there is provided a method for enhancing yield-related traits in plants, comprising introducing and expressing in a plant an allelic variant of any one of the nucleic acids given in Table A1, or Table A3, or Table A4, or Table A5, or Table A6 of the Examples section, or comprising introducing and expressing in a plant an allelic variant of a nucleic acid encoding an orthologue, paralogue or homologue of any of the amino acid sequences given in Table A1, or Table A3, or Table A4, or Table A5, or Table A6 of the Examples section.

[0338] Concerning YRP5 polypeptides, according to the present invention, there is provided a method for enhancing abiotic stress tolerance in plants, comprising introducing and expressing in a plant an allelic variant of any one of the nucleic acids given in Table A2, or comprising introducing and expressing in a plant an allelic variant of a nucleic acid encoding an orthologue, paralogue or homologue of any of the amino acid sequences given in Table A2.

[0339] Concerning LDOX polypeptides, the polypeptides encoded by allelic variants useful in the methods of the present invention have substantially the same biological activity as the LDOX polypeptide of SEQ ID NO: 2 and any of the amino acids depicted in Table A1 of the Examples section. Allelic variants exist in nature, and encompassed within the methods of the present invention is the use of these natural alleles. Preferably, the allelic variant is an allelic variant of SEQ ID NO: 1 or an allelic variant of a nucleic acid encoding an orthologue or paralogue of SEQ ID NO: 2. Preferably, the amino acid sequence encoded by the allelic variant, when used in the construction of a phylogenetic tree, such as the one depicted in FIG. 4, clusters within the group of LDOX polypeptides rather than with any other group; more preferably, the polypeptide sequence clusters within the subgroup A of the LDOX polypeptides comprising the amino acid sequence represented by SEQ ID NO: 2.

[0340] Concerning YRP5 polypeptides, the polypeptides encoded by allelic variants useful in the methods of the present invention have substantially the same biological activity as the YRP5 polypeptide of any of SEQ ID NO: 186 or any of the amino acids depicted in Table A2 of the Examples section. Allelic variants exist in nature, and encompassed within the methods of the present invention is the use of these natural alleles. Preferably, the allelic variant is an allelic variant of any of SEQ ID NO: 185 or SEQ ID NO: 187 or an allelic variant of a nucleic acid encoding an orthologue or paralogue of SEQ ID NO: 186 or SEQ ID NO: 188. Preferably, the amino acid sequence encoded by the allelic variant, clusters with the YRP5 polypeptides comprising the amino acid sequence represented by SEQ ID NO: 186 or SEQ ID NO: 188 rather than with any other group.

[0341] Concerning CK1 polypeptides, the polypeptides encoded by allelic variants useful in the methods of the present invention have substantially the same biological activity as the CK1 polypeptide of SEQ ID NO: 195 and any of the amino acids depicted in Table A3 of the Examples section. Allelic variants exist in nature, and encompassed within the methods of the present invention is the use of these natural alleles. Preferably, the allelic variant is an allelic variant of SEQ ID NO: 194 or an allelic variant of a nucleic acid encoding an orthologue or paralogue of SEQ ID NO: 195. Preferably, the amino acid sequence encoded by the allelic variant has in increasing order of preference at least 25%, 26%, 27%, 28%, 29%, 30%, 31%, 32%, 33%, 34%, 35%, 36%, 37%, 38%, 39%, 40%, 41%, 42%, 43%, 44%, 45%, 46%, 47%, 48%, 49%, 50%, 51%, 52%, 53%, 54%, 55%, 56%, 57%, 58%, 59%, 60%, 61%, 62%, 63%, 64%, 65%, 66%, 67%, 68%, 69%, 70%, 71%, 72%, 73%, 74%, 75%, 76%, 77%, 78%, 79%, 80%, 81%, 82%, 83%, 84%, 85%, 86%, 87%, 88%, 89%, 90%, 91%, 92%, 93%, 94%, 95%, 96%, 97%, 98%, or 99% sequence identity to the amino acid represented by any of the polypeptides of Table A3, preferably by SEQ ID NO: 195.

[0342] Concerning bHLH12-like polypeptides, the polypeptides encoded by allelic variants useful in the methods of the present invention have substantially the same biological activity as the bHLH12-like polypeptide of SEQ ID NO: 280 and any of the amino acids depicted in Table A4 of the Examples section. Allelic variants exist in nature, and encompassed within the methods of the present invention is the use of these natural alleles. Preferably, the allelic variant is an allelic variant of SEQ ID NO: 279 or an allelic variant of a nucleic acid encoding an orthologue or paralogue of SEQ ID NO: 280. Preferably, the amino acid sequence encoded by the allelic variant, when used in the construction of a phylogenetic tree, constructed with the polypeptide sequences referred to in FIG. 4 of Heim et al. (2003), clusters with any of the polypeptides of the Group XII in FIG. 4 of Heim et al. (2003), preferably within BEE3, rather than with any other group.

[0343] Concerning ADH2 polypeptides, the polypeptides encoded by allelic variants useful in the methods of the present invention have substantially the same biological activity as the ADH2 polypeptide of SEQ ID NO: 413 or SEQ ID NO: 415 and any of the amino acids depicted in Table A5 of the Examples section. Allelic variants exist in nature, and encompassed within the methods of the present invention is the use of these natural alleles. Preferably, the allelic variant is an allelic variant of SEQ ID NO: 412 or SEQ ID NO: 414 or an allelic variant of a nucleic acid encoding an orthologue or paralogue of SEQ ID NO: 413 or SEQ ID NO: 415. Preferably, the amino acid sequence encoded by the allelic variant, when used in the construction of a phylogenetic tree, such as the one depicted in FIG. 12, clusters with the ADH2 polypeptides comprising the amino acid sequence represented by SEQ ID NO: 413 or SEQ ID NO: 415 rather than with any other group.

[0344] Concerning GCN5 polypeptides, the polypeptides encoded by allelic variants useful in the methods of the present invention have substantially the same biological activity as the GCN5-like polypeptide of SEQ ID NO: 460 and any of the amino acids depicted in Table A6 of the Examples section. Allelic variants exist in nature, and encompassed within the methods of the present invention is the use of these natural alleles. Preferably, the allelic variant is an allelic variant of SEQ ID NO: 459 or an allelic variant of a nucleic acid encoding an orthologue or paralogue of SEQ ID NO: 460. Preferably, the amino acid sequence encoded by the allelic variant, when used in the construction of a phylogenetic tree, such as the one depicted in FIG. 15, clusters with the GCN5-like polypeptide comprising the amino acid sequence represented by SEQ ID NO: 460 rather than with any other group.

[0345] Gene shuffling or directed evolution may also be used to generate variants of nucleic acids encoding LDOX polypeptides, or YRP5 polypeptides, or CK1 polypeptides, or bHLH12-like polypeptides, or ADH2 polypeptides, or GCN5-like polypeptides, as defined above; the term “gene shuffling” being as defined herein.

[0346] Concerning LDOX polypeptides, or CK1 polypeptides, or bHLH12-like polypeptides, or ADH2 polypeptides, or GCN5-like polypeptides, according to the present invention, there is provided a method for enhancing yield-related traits in plants, comprising introducing and expressing in a plant a variant of any one of the nucleic acid sequences given in Table A1, or Table A3, or Table A4, or Table A5, or Table A6 of the Examples section, or comprising introducing and expressing in a plant a variant of a nucleic acid encoding an orthologue, paralogue or homologue of any of the amino acid sequences given in Table A1, or Table A3, or Table A4, or Table A5, or Table A6 of the Examples section, which variant nucleic acid is obtained by gene shuffling.

[0347] Concerning YRP5 polypeptides, according to the present invention, there is provided a method for enhancing abiotic stress tolerance in plants, comprising introducing and expressing in a plant a variant of any one of the nucleic acid sequences given in Table A2 of the Examples section, or comprising introducing and expressing in a plant a variant of a nucleic acid encoding an orthologue, paralogue or homologue of any of the amino acid sequences given in Table A2 of the Examples section, which variant nucleic acid is obtained by gene shuffling.

[0348] Concerning LDOX polypeptides, preferably, the amino acid sequence encoded by the variant nucleic acid obtained by gene shuffling, when used in the construction of a phylogenetic tree such as the one depicted in FIG. 4, clusters within the group of LDOX polypeptides rather than with any other group; more preferably, the polypeptide sequence clusters within the subgroup A of the LDOX polypeptides comprising the amino acid sequence represented by SEQ ID NO: 2.

[0349] Concerning YRP5 polypeptides, preferably, the amino acid sequence encoded by the variant nucleic acid obtained by gene shuffling, when used in the construction of a phylogenetic tree, clusters with the group of YRP5 polypeptides comprising the amino acid sequence represented by SEQ ID NO: 186 or SEQ ID NO: 188 rather than with any other group.

[0350] Concerning CK1 polypeptides, preferably, the amino acid sequence encoded by the variant nucleic acid obtained by gene shuffling has in increasing order of preference at least 25%, 26%, 27%, 28%, 29%, 30%, 31%, 32%, 33%, 34%, 35%, 36%, 37%, 38%, 39%, 40%, 41%, 42%, 43%, 44%, 45%, 46%, 47%, 48%, 49%, 50%, 51%, 52%, 53%, 54%, 55%, 56%, 57%, 58%, 59%, 60%, 61%, 62%, 63%, 64%, 65%, 66%, 67%, 68%, 69%, 70%, 71%, 72%, 73%, 74%, 75%, 76%, 77%, 78%, 79%, 80%, 81%, 82%, 83%, 84%, 85%, 86%, 87%, 88%, 89%, 90%, 91%, 92%, 93%, 94%, 95%, 96%, 97%, 98%, or 99% sequence identity to the amino acid represented by any of the polypeptides of Table A3, preferably by SEQ ID NO: 195.

[0351] Concerning bHLH12-like polypeptides, preferably, the amino acid sequence encoded by the variant nucleic acid obtained by gene shuffling, when used in the construction of a phylogenetic tree, constructed with the polypeptide sequences referred to in FIG. 4 of Heim et al. (2003), clusters with any of the polypeptides of the Group XII in FIG. 4 of Heim et al. (2003), preferably within BEE3, rather than with any other group.

[0352] Concerning ADH2 polypeptides, preferably, the amino acid sequence encoded by the variant nucleic acid obtained by gene shuffling, when used in the construction of a phylogenetic tree such as the one depicted in FIG. 12, clusters with the group of ADH2 polypeptides comprising the amino acid sequence represented by SEQ ID NO: 413 or SEQ ID NO: 415 rather than with any other group.

[0353] Concerning GCN5 polypeptides, preferably, the amino acid sequence encoded by the variant nucleic acid obtained by gene shuffling, when used in the construction of a phylogenetic tree such as the one depicted in FIG. 15, clusters with the group of GCN5-like polypeptide comprising the amino acid sequence represented by SEQ ID NO: 460 rather than with any other group.

[0354] Furthermore, nucleic acid variants may also be obtained by site-directed mutagenesis. Several methods are available to achieve site-directed mutagenesis, the most common being PCR based methods (Current Protocols in Molecular Biology. Wiley Eds.).

[0355] Nucleic acids encoding LDOX polypeptides may be derived from any natural or artificial source, including fungi or bacteria. The nucleic acid may be modified from its native form in composition and/or genomic environment through deliberate human manipulation. Preferably the LDOX polypeptide-encoding nucleic acid is from a plant, further preferably from a dicotyledonous plant, more preferably from the family Brassicaceae, most preferably the nucleic acid is from Arabidopsis thaliana.

[0356] Nucleic acids encoding YRP5 polypeptides may be derived from any natural or artificial source. The nucleic acid may be modified from its native form in composition and/or genomic environment through deliberate human manipulation. Preferably the YRP5 polypeptide-encoding nucleic acid is from a plant, further preferably from a monocotyledonous or dicotyledonous plant, more preferably from the family Poaceae or Solanaceae.

[0357] Nucleic acids encoding CK1 polypeptides may be derived from any natural or artificial source. The nucleic acid may be modified from its native form in composition and/or genomic environment through deliberate human manipulation. Preferably the CK1 polypeptide-encoding nucleic acid is from a plant, further preferably from a dicotyledonous plant, further preferably from the family Brassicaceae, more preferably from the genus Arabidopsis, most preferably from Arabidopsis thaliana.

[0358] Nucleic acids encoding bHLH12-like polypeptides may be derived from any natural or artificial source. The nucleic acid may be modified from its native form in composition and/or genomic environment through deliberate human manipulation. Preferably the bHLH12-like polypeptide-encoding nucleic acid is from a plant, further preferably from a dicotyledonous plant, further preferably from the genus Populus, most preferably from Populus trichocarpa.

[0359] Nucleic acids encoding ADH2 polypeptides may be derived from any natural or artificial source. The nucleic acid may be modified from its native form in composition and/or genomic environment through deliberate human manipulation. Preferably the ADH2-polypeptide-encoding nucleic acid is from a plant, further preferably from a monocotyledonous plant, more preferably from the family Poaceae, most preferably the nucleic acid is from Saccharum officinarum.

[0360] Nucleic acids encoding GCN5-like polypeptide may be derived from any natural or artificial source. The nucleic acid may be modified from its native form in composition and/or genomic environment through deliberate human manipulation. Preferably the GCN5-like polypeptide-encoding nucleic acid is from a plant, further preferably from a monocotyledonous plant, more preferably from the family Poaceae, most preferably the nucleic acid is from Oryza sativa.

[0361] Concerning LDOX polypeptides, performance of the methods of the invention gives plants having enhanced yield-related traits. In particular performance of the methods of the invention gives plants having increased yield, especially increased seed yield and/or enhanced root growth and/or increased early vigour, relative to control plants. The terms “yield”, “seed yield” and “early vigour” are described in more detail in the “definitions” section herein.

[0362] Concerning CK1 polypeptides, or bHLH12-like polypeptides, or ADH2 polypeptides, or GCN5 polypeptides, performance of the methods of the invention gives plants having enhanced yield-related traits. In particular performance of the methods of the invention gives plants having increased yield, especially increased seed yield relative to control plants. The terms “yield” and “seed yield” are described in more detail in the “definitions” section herein.

[0363] Concerning YRP5 polypeptides, performance of the methods of the invention gives plants having enhanced tolerance to abiotic stress.

[0364] Reference herein to enhanced yield-related traits is taken to mean an increase in biomass (weight) of one or more parts of a plant, which may include aboveground (harvestable) parts and/or (harvestable) parts below ground. In particular, such harvestable parts are seeds, above-ground biomass and/or roots, and performance of the methods of the invention results in plants having increased biomass and/or seed yield relative to the seed yield of control plants.

[0365] Taking corn as an example, a yield increase may be manifested as one or more of the following: increase in the number of plants established per square meter, an increase in the number of ears per plant, an increase in the number of rows, number of kernels per row, kernel weight, thousand kernel weight, ear length/diameter, increase in the seed filling rate (which is the number of filled seeds divided by the total number of seeds and multiplied by 100), among others.

[0366] Taking rice as an example, a yield increase may manifest itself as an increase in one or more of the following: number of plants per square meter, number of panicles per plant, panicle length, number of spikelets per panicle, number of flowers (florets) per panicle, increase in the seed filling rate (which is the number of filled seeds divided by the total number of seeds and multiplied by 100), increase in thousand kernel weight, among others. In rice, submergence tolerance may also result in increased yield.

[0367] Concerning abiotic stress, the present invention provides a method for enhancing stress tolerance in plants, relative to control plants, which method comprises modulating expression in a plant of a nucleic acid encoding a YRP5 polypeptide as defined herein.

[0368] Plants typically respond to exposure to stress by growing more slowly. In conditions of severe stress, the plant may even stop growing altogether. Mild stress on the other hand is defined herein as being any stress to which a plant is exposed which does not result in the plant ceasing to grow altogether without the capacity to resume growth. Mild stress in the sense of the invention leads to a reduction in the growth of the stressed plants of less than 40%, 35%, 30% or 25%, more preferably less than 20% or 15% in comparison to the control plant under non-stress conditions. Due to advances in agricultural practices (irrigation, fertilization, pesticide treatments) severe stresses are not often encountered in cultivated crop plants. As a consequence, the compromised growth induced by mild stress is often an undesirable feature for agriculture. Mild stresses are the everyday biotic and/or abiotic (environmental) stresses to which a plant is exposed. Abiotic stresses may be due to drought or excess water, anaerobic stress, salt stress, chemical toxicity, oxidative stress and hot, cold or freezing temperatures. The abiotic stress may be an osmotic stress caused by a water stress (particularly due to drought), salt stress, oxidative stress or an ionic stress. Biotic stresses are typically those stresses caused by pathogens, such as bacteria, viruses, fungi, nematodes and insects.

[0369] In particular, the methods of the present invention may be performed under conditions of (mild) drought to give plants having enhanced drought tolerance relative to control plants, which might manifest itself as an increased yield relative to control plants. As reported in Wang et al. (Planta (2003) 218: 1-14), abiotic stress leads to a series of morphological, physiological, biochemical and molecular changes that adversely affect plant growth and productivity. Drought, salinity, extreme temperatures and oxidative stress are known to be interconnected and may induce growth and cellular damage through similar mechanisms. Rabbani et al. (Plant Physiol (2003) 133: 1755-1767) describes a particularly high degree of “cross talk” between drought stress and high-salinity stress. For example, drought and/or salinisation are manifested primarily as osmotic stress, resulting in the disruption of homeostasis and ion distribution in the cell. Oxidative stress, which frequently accompanies high or low temperature, salinity or drought stress, may cause denaturing of functional and structural proteins. As a consequence, these diverse environmental stresses often activate similar cell signalling pathways and cellular responses, such as the production of stress proteins, up-regulation of anti-oxidants, accumulation of compatible solutes and growth arrest. The term “non-stress” conditions as used herein are those environmental conditions that allow optimal growth of plants. Persons skilled in the art are aware of normal soil conditions and climatic conditions for a given location. Plants with optimal growth conditions, (grown under non-stress conditions) typically yield in increasing order of preference at least 97%, 95%, 92%, 90%, 87%, 85%, 83%, 80%, 77% or 75% of the average production of such plant in a given environment. Average production may be calculated on harvest and/or season basis. Persons skilled in the art are aware of average yield productions of a crop.

[0370] Performance of the methods of the invention gives plants grown under (mild) drought conditions enhanced drought tolerance relative to control plants grown under comparable conditions. Therefore, according to the present invention, there is provided a method for enhancing drought tolerance in plants grown under (mild) drought conditions, which method comprises modulating expression in a plant of a nucleic acid encoding a YRP5 polypeptide.

[0371] Performance of the methods of the invention gives plants grown under conditions of nutrient deficiency, particularly under conditions of nitrogen deficiency, enhanced tolerance to stresses caused by nutrient deficiency relative to control plants. Therefore, according to the present invention, there is provided a method for enhancing tolerance to stresses caused by nutrient deficiency, which method comprises modulating expression in a plant of a nucleic acid encoding an LDOX polypeptide, or a YRP5 polypeptide, or a CK1 polypeptide, or a bHLH12-like polypeptide, or an ADH2 polypeptide, or a GCN5-like polypeptide. Nutrient deficiency may result from a lack of nutrients such as nitrogen, phosphates and other phosphorous-containing compounds, potassium, calcium, magnesium, manganese, iron and boron, amongst others.

[0372] Performance of the methods of the invention gives plants grown under conditions of salt stress, enhanced tolerance to salt relative to control plants grown under comparable conditions. Therefore, according to the present invention, there is provided a method for enhancing salt tolerance in plants grown under conditions of salt stress, which method comprises modulating expression in a plant of a nucleic acid encoding an LDOX polypeptide, or a YRP5 polypeptide, or a CK1 polypeptide, or a bHLH12-like polypeptide, or an ADH2 polypeptide, or a GCN5-like polypeptide. The term salt stress is not restricted to common salt (NaCl), but may be any one or more of: NaCl, KCl, LiCl, MgCl₂, CaCl₂, amongst others.

[0373] Concerning yield-related traits, the present invention provides a method for increasing yield, especially seed yield of plants, relative to control plants, which method comprises modulating expression in a plant of a nucleic acid encoding an LDOX polypeptide, or a CK1 polypeptide, or a bHLH12-like polypeptide, or an ADH2 polypeptide, or a GCN5-like polypeptide, as defined herein.

[0374] Since the transgenic plants according to the present invention have increased yield, it is likely that these plants exhibit an increased growth rate (during at least part of their life cycle), relative to the growth rate of control plants at a corresponding stage in their life cycle.

[0375] The increased growth rate may be specific to one or more parts of a plant (including seeds), or may be throughout substantially the whole plant. Plants having an increased growth rate may have a shorter life cycle. The life cycle of a plant may be taken to mean the time needed to grow from a dry mature seed up to the stage where the plant has produced dry mature seeds, similar to the starting material. This life cycle may be influenced by factors such as speed of germination, early vigour, growth rate, greenness index, flowering time and speed of seed maturation. The increase in growth rate may take place at one or more stages in the life cycle of a plant or during substantially the whole plant life cycle. Increased growth rate during the early stages in the life cycle of a plant may reflect enhanced vigour. The increase in growth rate may alter the harvest cycle of a plant allowing plants to be sown later and/or harvested sooner than would otherwise be possible (a similar effect may be obtained with earlier flowering time). If the growth rate is sufficiently increased, it may allow for the further sowing of seeds of the same plant species (for example sowing and harvesting of rice plants followed by sowing and harvesting of further rice plants all within one conventional growing period). Similarly, if the growth rate is sufficiently increased, it may allow for the further sowing of seeds of different plants species (for example the sowing and harvesting of corn plants followed by, for example, the sowing and optional harvesting of soybean, potato or any other suitable plant). Harvesting additional times from the same rootstock in the case of some crop plants may also be possible. Altering the harvest cycle of a plant may lead to an increase in annual biomass production per square meter (due to an increase in the number of times (say in a year) that any particular plant may be grown and harvested). An increase in growth rate may also allow for the cultivation of transgenic plants in a wider geographical area than their wild-type counterparts, since the territorial limitations for growing a crop are often determined by adverse environmental conditions either at the time of planting (early season) or at the time of harvesting (late season). Such adverse conditions may be avoided if the harvest cycle is shortened. The growth rate may be determined by deriving various parameters from growth curves, such parameters may be: T-Mid (the time taken for plants to reach 50% of their maximal size) and T-90 (time taken for plants to reach 90% of their maximal size), amongst others.

[0376] According to a preferred feature of the present invention, performance of the methods of the invention gives plants having an increased growth rate relative to control plants. Therefore, according to the present invention, there is provided a method for increasing the growth rate of plants, which method comprises modulating expression in a plant of a nucleic acid encoding an LDOX polypeptide, or a CK1 polypeptide, or a bHLH12-like polypeptide, or an ADH2 polypeptide, or a GCN5-like polypeptide, as defined herein.

[0377] An increase in yield and/or growth rate occurs whether the plant is under non-stress conditions or whether the plant is exposed to various stresses compared to control plants. Plants typically respond to exposure to stress by growing more slowly. In conditions of severe stress, the plant may even stop growing altogether. Mild stress on the other hand is defined herein as being any stress to which a plant is exposed which does not result in the plant ceasing to grow altogether without the capacity to resume growth. Mild stress in the sense of the invention leads to a reduction in the growth of the stressed plants of less than 40%, 35%, 30% or 25%, more preferably less than 20% or 15% in comparison to the control plant under non-stress conditions. Due to advances in agricultural practices (irrigation, fertilization, pesticide treatments) severe stresses are not often encountered in cultivated crop plants. As a consequence, the compromised growth induced by mild stress is often an undesirable feature for agriculture. Mild stresses are the everyday biotic and/or abiotic (environmental) stresses to which a plant is exposed. Abiotic stresses may be due to drought or excess water, anaerobic stress, salt stress, chemical toxicity, oxidative stress and hot, cold or freezing temperatures. The abiotic stress may be an osmotic stress caused by a water stress (particularly due to drought), salt stress, oxidative stress or an ionic stress. Biotic stresses are typically those stresses caused by pathogens, such as bacteria, viruses, fungi, nematodes and insects. Biotic stresses are typically those stresses caused by pathogens, such as bacteria, viruses, fungi, nematodes, and insects. The term “non-stress” conditions as used herein are those environmental conditions that allow optimal growth of plants. Persons skilled in the art are aware of normal soil conditions and climatic conditions for a given location. The term non-stress conditions as used herein, encompasses the occasional or everyday mild stresses to which a plant is exposed, as defined herein, but does not encompass severe stresses.

[0378] The methods of the present invention may be performed under non-stress conditions or under conditions of mild drought to give plants having increased yield relative to control plants. As reported in Wang et al. (Planta (2003) 218: 1-14), abiotic stress leads to a series of morphological, physiological, biochemical and molecular changes that adversely affect plant growth and productivity. Drought, salinity, extreme temperatures and oxidative stress are known to be interconnected and may induce growth and cellular damage through similar mechanisms. Rabbani et al. (Plant Physiol (2003) 133: 1755-1767) describes a particularly high degree of “cross talk” between drought stress and high-salinity stress. For example, drought and/or salinisation are manifested primarily as osmotic stress, resulting in the disruption of homeostasis and ion distribution in the cell. Oxidative stress, which frequently accompanies high or low temperature, salinity or drought stress, may cause denaturing of functional and structural proteins. As a consequence, these diverse environmental stresses often activate similar cell signalling pathways and cellular responses, such as the production of stress proteins, up-regulation of anti-oxidants, accumulation of compatible solutes and growth arrest. The term “non-stress” conditions as used herein are those environmental conditions that allow optimal growth of plants. Persons skilled in the art are aware of normal soil conditions and climatic conditions for a given location. Plants with optimal growth conditions, (grown under non-stress conditions) typically yield in increasing order of preference at least 97%, 95%, 92%, 90%, 87%, 85%, 83%, 80%, 77% or 75% of the average production of such plant in a given environment. Average production may be calculated on harvest and/or season basis. Persons skilled in the art are aware of average yield productions of a crop.

[0379] Performance of the methods of the invention gives plants grown under non-stress conditions or under mild drought conditions increased yield relative to control plants grown under comparable conditions. Therefore, according to the present invention, there is provided a method for increasing yield in plants grown under non-stress conditions or under mild drought conditions, which method comprises modulating expression in a plant of a nucleic acid encoding an LDOX polypeptide, or a CK1 polypeptide, or a bHLH12-like polypeptide, or an ADH2 polypeptide, or a GCN5-like polypeptide.

[0380] The present invention encompasses plants or parts thereof (including seeds) obtainable by the methods according to the present invention. The plants or parts thereof comprise a nucleic acid transgene encoding an LDOX polypeptide, or a YRP5 polypeptide, or a CK1 polypeptide, or a bHLH12-like polypeptide, or an ADH2 polypeptide, or a GCN5-like polypeptide, as defined above.

[0381] The invention also provides genetic constructs and vectors to facilitate introduction and/or expression in plants of nucleic acids encoding LDOX polypeptides, or YRP5 polypeptides, or CK1 polypeptides, or bHLH12-like polypeptides, or ADH2 polypeptides, or GCN5-like polypeptides. The gene constructs may be inserted into vectors, which may be commercially available, suitable for transforming into plants and suitable for expression of the gene of interest in the transformed cells. The invention also provides use of a gene construct as defined herein in the methods of the invention.

[0382] More specifically, the present invention provides a construct comprising:

[0383] (a) a nucleic acid encoding an LDOX polypeptide, or a YRP5 polypeptide, or a CK1 polypeptide, or a bHLH12-like polypeptide, or an ADH2 polypeptide, or a GCN5-like polypeptide, as defined above; (b) one or more control sequences capable of driving expression of the nucleic acid sequence of (a); and optionally (c) a transcription termination sequence.

[0384] Preferably, the nucleic acid encoding an LDOX polypeptide, or a YRP5 polypeptide, or a CK1 polypeptide, or a bHLH12-like polypeptide, or an ADH2 polypeptide, or a GCN5-like polypeptide, is as defined above. The term “control sequence” and “termination sequence” are as defined herein.

[0385] Plants are transformed with a vector comprising any of the nucleic acids described above. The skilled artisan is well aware of the genetic elements that must be present on the vector in order to successfully transform, select and propagate host cells containing the sequence of interest. The sequence of interest is operably linked to one or more control sequences (at least to a promoter).

[0386] Concerning LDOX polypeptides, or YRP5 polypeptides, or CK1 polypeptides, or bHLH12-like polypeptides, or GCN5-like polypeptides, advantageously, any type of promoter, whether natural or synthetic, may be used to drive expression of the nucleic acid sequence, but preferably the promoter is of plant origin. A constitutive promoter is particularly useful in the methods. Preferably the constitutive promoter is a ubiquitous constitutive promoter of medium strength. See the “Definitions” section herein for definitions of the various promoter types. Concerning GCN5-like polypeptides, also useful in the methods of the invention is a root-specific promoter.

[0387] Concerning ADH2 polypeptides, advantageously, any type of promoter, whether natural or synthetic, may be used to drive expression of the nucleic acid sequence, but preferably the promoter is of plant origin. A seed-specific promoter is particularly useful in the methods. See the “Definitions” section herein for definitions of the various promoter types.

[0388] Concerning LDOX polypeptides, it should be clear that the applicability of the present invention is not restricted to the LDOX polypeptide-encoding nucleic acid represented by SEQ ID NO: 1, nor is the applicability of the invention restricted to expression of a LDOX polypeptide-encoding nucleic acid when driven by a constitutive promoter.

[0389] The constitutive promoter is preferably a medium strength promoter. More preferably it is a plant derived promoter, such as a GOS2 promoter or a promoter of substantially the same strength and having substantially the same expression pattern (a functionally equivalent promoter), more preferably the promoter is the promoter GOS2 promoter from rice. Further preferably the constitutive promoter is represented by a nucleic acid sequence substantially similar to SEQ ID NO: 184, most preferably the constitutive promoter is as represented by SEQ ID NO: 184. See the “Definitions” section herein for further examples of constitutive promoters.

[0390] Optionally, one or more terminator sequences may be used in the construct introduced into a plant. Preferably, the construct comprises an expression cassette comprising a rice GOS2 promoter, substantially similar to SEQ ID NO: 184, and the nucleic acid encoding the LDOX polypeptide.

[0391] Concerning YRP5 polypeptides, it should be clear that the applicability of the present invention is not restricted to the YRP5 polypeptide-encoding nucleic acid represented by SEQ ID NO: 185 or SEQ ID NO: 187, nor is the applicability of the invention restricted to expression of a YRP5 polypeptide-encoding nucleic acid when driven by a constitutive promoter.

[0392] The constitutive promoter is preferably a medium strength promoter. More preferably it is a plant derived promoter, such as a GOS2 promoter or a promoter of substantially the same strength and having substantially the same expression pattern (a functionally equivalent promoter), more preferably the promoter is the promoter GOS2 promoter from rice. Further preferably the constitutive promoter is represented by a nucleic acid sequence substantially similar to SEQ ID NO: 189, most preferably the constitutive promoter is as represented by SEQ ID NO: 189. See the “Definitions” section herein for further examples of constitutive promoters.

[0393] Optionally, one or more terminator sequences may be used in the construct introduced into a plant. Preferably, the construct comprises an expression cassette comprising a (GOS2) promoter, substantially similar to SEQ ID NO: 189, and the nucleic acid encoding the YRP5 polypeptide.

[0394] Concerning CK1 polypeptides, It should be clear that the applicability of the present invention is not restricted to the CK1 polypeptide-encoding nucleic acid represented by SEQ ID NO: 194, nor is the applicability of the invention restricted to expression of a CK1 polypeptide-encoding nucleic acid when driven by a constitutive promoter.

[0395] The constitutive promoter is preferably a medium strength promoter. More preferably it is a plant derived promoter, such as a GOS2 promoter or a promoter of substantially the same strength and having substantially the same expression pattern (a functionally equivalent promoter), more preferably the promoter is the promoter GOS2 promoter from rice. Further preferably the constitutive promoter is represented by a nucleic acid sequence substantially similar to SEQ ID NO: 272, most preferably the constitutive promoter is as represented by SEQ ID NO: 272. See the “Definitions” section herein for further examples of constitutive promoters.

[0396] Optionally, one or more terminator sequences may be used in the construct introduced into a plant. Preferably, the construct comprises an expression cassette comprising a GOS2 promoter, substantially similar to SEQ ID NO: 272, and the nucleic acid encoding the CK1 polypeptide.

[0397] Concerning bHLH12-like polypeptides, It should be clear that the applicability of the present invention is not restricted to the bHLH12-like polypeptide-encoding nucleic acid represented by SEQ ID NO: 279, nor is the applicability of the invention restricted to expression of a bHLH12-like polypeptide-encoding nucleic acid when driven by a constitutive promoter.

[0398] The constitutive promoter is preferably a medium strength promoter. More preferably it is a plant derived promoter, such as a GOS2 promoter or a promoter of substantially the same strength and having substantially the same expression pattern (a functionally equivalent promoter), more preferably the promoter is the promoter GOS2 promoter from rice. Further preferably the constitutive promoter is represented by a nucleic acid sequence substantially similar to SEQ ID NO: 357, most preferably the constitutive promoter is as represented by SEQ ID NO: 357. See the “Definitions” section herein for further examples of constitutive promoters.

[0399] Optionally, one or more terminator sequences may be used in the construct introduced into a plant. Preferably, the construct comprises an expression cassette comprising a GOS2 promoter, substantially similar to SEQ ID NO: 357, and the nucleic acid encoding the bHLH12-like polypeptide.

[0400] Concerning ADH2 polypeptides, It should be clear that the applicability of the present invention is not restricted to the ADH2 polypeptide-encoding nucleic acid represented by SEQ ID NO: 412 or SEQ ID NO: 414, nor is the applicability of the invention restricted to expression of an ADH2 polypeptide-encoding nucleic acid when driven by a seed-specific promoter.

[0401] The seed-specific promoter is preferably from rice. Further preferably the seed-specific promoter is represented by a nucleic acid sequence substantially similar to SEQ ID NO: 458, or a promoter of substantially the same strength and having substantially the same expression pattern (a functionally equivalent promoter), most preferably the seed-specific promoter is as represented by SEQ ID NO: 458. See the “Definitions” section herein for further examples of seed-specific promoters.

[0402] Optionally, one or more terminator sequences may be used in the construct introduced into a plant. Preferably, the construct comprises an expression cassette comprising a putative proteinase inhibitor promoter, substantially similar to SEQ ID NO: 458, and the nucleic acid encoding the ADH2 polypeptide.

[0403] Concerning GCN5 polypeptides, It should be clear that the applicability of the present invention is not restricted to the GCN5-like polypeptide-encoding nucleic acid represented by SEQ ID NO: 459, nor is the applicability of the invention restricted to expression of a GCN5-like polypeptide-encoding nucleic acid when driven by a constitutive promoter, or when driven by a root-specific promoter.

[0404] The constitutive promoter is preferably a medium strength promoter. More preferably it is a plant derived promoter, such as a GOS2 promoter or a promoter of substantially the same strength and having substantially the same expression pattern (a functionally equivalent promoter), more preferably the promoter is the promoter GOS2 promoter from rice. Further preferably the constitutive promoter is represented by a nucleic acid sequence substantially similar to SEQ ID NO: 513, most preferably the constitutive promoter is as represented by SEQ ID NO: 513. See the “Definitions” section herein for further examples of constitutive promoters.

[0405] Optionally, one or more terminator sequences may be used in the construct introduced into a plant. Preferably, the construct comprises an expression cassette comprising a GOS2 promoter, substantially similar to SEQ ID NO: 513, and the nucleic acid encoding the GCN5-like polypeptide.

[0406] Additional regulatory elements may include transcriptional as well as translational enhancers. Those skilled in the art will be aware of terminator and enhancer sequences that may be suitable for use in performing the invention. An intron sequence may also be added to the 5′ untranslated region (UTR) or in the coding sequence to increase the amount of the mature message that accumulates in the cytosol, as described in the definitions section. Other control sequences (besides promoter, enhancer, silencer, intron sequences, 3′UTR and/or 5′UTR regions) may be protein and/or RNA stabilizing elements. Such sequences would be known or may readily be obtained by a person skilled in the art.

[0407] The genetic constructs of the invention may further include an origin of replication sequence that is required for maintenance and/or replication in a specific cell type. One example is when a genetic construct is required to be maintained in a bacterial cell as an episomal genetic element (e.g. plasmid or cosmid molecule). Preferred origins of replication include, but are not limited to, the f1-ori and colE1.

[0408] For the detection of the successful transfer of the nucleic acid sequences as used in the methods of the invention and/or selection of transgenic plants comprising these nucleic acids, it is advantageous to use marker genes (or reporter genes). Therefore, the genetic construct may optionally comprise a selectable marker gene. Selectable markers are described in more detail in the “definitions” section herein. The marker genes may be removed or excised from the transgenic cell once they are no longer needed. Techniques for marker removal are known in the art, useful techniques are described above in the definitions section.

[0409] The invention also provides a method for the production of transgenic plants having enhanced yield-related traits relative to control plants, comprising introduction and expression in a plant of any nucleic acid encoding an LDOX polypeptide, or a YRP5 polypeptide, or a CK1 polypeptide, or a bHLH12-like polypeptide, or an ADH2 polypeptide, or a GCN5-like polypeptide, as defined hereinabove.

[0410] More specifically, the present invention provides a method for the production of transgenic plants having enhanced yield-related traits, particularly increased biomass, increased seed yield and/or increased early vigour, which method comprises:

[0411] (i) introducing and expressing in a plant or plant cell a LDOX polypeptide-encoding nucleic acid; and

[0412] (ii) cultivating the plant cell under conditions promoting plant growth and development.

[0413] The nucleic acid of (i) may be any of the nucleic acids capable of encoding a LDOX polypeptide as defined herein.

[0414] More specifically, the present invention provides a method for the production of transgenic plants having enhanced abiotic stress tolerance, particularly increased (mild) drought tolerance, which method comprises:

[0415] (i) introducing and expressing in a plant or plant cell a YRP5 polypeptide-encoding nucleic acid; and

[0416] (ii) cultivating the plant cell under abiotic stress conditions.

[0417] The nucleic acid of (i) may be any of the nucleic acids capable of encoding a YRP5 polypeptide as defined herein.

[0418] More specifically, the present invention provides a method for the production of transgenic plants having enhanced yield-related traits, particularly increased (seed) yield, which method comprises:

[0419] (i) introducing and expressing in a plant or plant cell a nucleic acid encoding a CK1 polypeptide, or a bHLH12-like polypeptide, or an ADH2 polypeptide, or a GCN5-like polypeptide; and

[0420] (ii) cultivating the plant cell under conditions promoting plant growth and development.

[0421] The nucleic acid of (i) may be any of the nucleic acids capable of encoding a CK1 polypeptide, or a bHLH12-like polypeptide, or an ADH2 polypeptide, or a GCN5-like polypeptide, as defined herein.

[0422] The nucleic acid may be introduced directly into a plant cell or into the plant itself (including introduction into a tissue, organ or any other part of a plant). According to a preferred feature of the present invention, the nucleic acid is preferably introduced into a plant by transformation. The term “transformation” is described in more detail in the “definitions” section herein.

[0423] The genetically modified plant cells can be regenerated via all methods with which the skilled worker is familiar. Suitable methods can be found in the above-mentioned publications by S. D. Kung and R. Wu, Potrykus or Höfgen and Willmitzer.

[0424] Generally after transformation, plant cells or cell groupings are selected for the presence of one or more markers which are encoded by plant-expressible genes co-transferred with the gene of interest, following which the transformed material is regenerated into a whole plant. To select transformed plants, the plant material obtained in the transformation is, as a rule, subjected to selective conditions so that transformed plants can be distinguished from untransformed plants. For example, the seeds obtained in the above-described manner can be planted and, after an initial growing period, subjected to a suitable selection by spraying. A further possibility consists in growing the seeds, if appropriate after sterilization, on agar plates using a suitable selection agent so that only the transformed seeds can grow into plants. Alternatively, the transformed plants are screened for the presence of a selectable marker such as the ones described above.

[0425] Following DNA transfer and regeneration, putatively transformed plants may also be evaluated, for instance using Southern analysis, for the presence of the gene of interest, copy number and/or genomic organisation. Alternatively or additionally, expression levels of the newly introduced DNA may be monitored using Northern and/or Western analysis, both techniques being well known to persons having ordinary skill in the art.

[0426] The generated transformed plants may be propagated by a variety of means, such as by clonal propagation or classical breeding techniques. For example, a first generation (or T1) transformed plant may be selfed and homozygous second-generation (or T2) transformants selected, and the T2 plants may then further be propagated through classical breeding techniques. The generated transformed organisms may take a variety of forms. For example, they may be chimeras of transformed cells and non-transformed cells; clonal transformants (e.g., all cells transformed to contain the expression cassette); grafts of transformed and untransformed tissues (e.g., in plants, a transformed rootstock grafted to an untransformed scion).

[0427] The present invention clearly extends to any plant cell or plant produced by any of the methods described herein, and to all plant parts and propagules thereof. The present invention extends further to encompass the progeny of a primary transformed or transfected cell, tissue, organ or whole plant that has been produced by any of the aforementioned methods, the only requirement being that progeny exhibit the same genotypic and/or phenotypic characteristic(s) as those produced by the parent in the methods according to the invention.

[0428] The invention also includes host cells containing an isolated nucleic acid encoding an LDOX polypeptide, or a YRP5 polypeptide, or a CK1 polypeptide, or a bHLH12-like polypeptide, or an ADH2 polypeptide, or a GCN5-like polypeptide, as defined hereinabove. Preferred host cells according to the invention are plant cells. Host plants for the nucleic acids or the vector used in the method according to the invention, the expression cassette or construct or vector are, in principle, advantageously all plants, which are capable of synthesizing the polypeptides used in the inventive method.

[0429] The methods of the invention are advantageously applicable to any plant. Plants that are particularly useful in the methods of the invention include all plants which belong to the superfamily Viridiplantae, in particular monocotyledonous and dicotyledonous plants including fodder or forage legumes, ornamental plants, food crops, trees or shrubs. According to a preferred embodiment of the present invention, the plant is a crop plant. Examples of crop plants include chicory, carrot, cassaya, trefoil, soybean, beet, sugar beet, sunflower, canola, alfalfa, rapeseed, linseed, cotton, tomato, potato and tobacco. Further preferably, the plant is a monocotyledonous plant. Examples of monocotyledonous plants include sugarcane. More preferably the plant is a cereal. Examples of cereals include rice, maize, wheat, barley, millet, rye, triticale, sorghum, emmer, spelt, secale, einkorn, teff, milo and oats.

[0430] The invention also extends to harvestable parts of a plant such as, but not limited to seeds, leaves, fruits, flowers, stems, roots, rhizomes, tubers and bulbs, which harvestable parts comprise a recombinant nucleic acid encoding an LDOX polypeptide, or a YRP5 polypeptide, or a CK1 polypeptide, or a bHLH12-like polypeptide, or an ADH2 polypeptide, or a GCN5-like polypeptide. The invention furthermore relates to products derived, preferably directly derived, from a harvestable part of such a plant, such as dry pellets or powders, oil, fat and fatty acids, starch or proteins.

[0431] According to a preferred feature of the invention, the modulated expression is increased expression. Methods for increasing expression of nucleic acids or genes, or gene products, are well documented in the art and examples are provided in the definitions section.

[0432] As mentioned above, a preferred method for modulating expression of a nucleic acid encoding an LDOX polypeptide, or a YRP5 polypeptide, or a CK1 polypeptide, or a bHLH12-like polypeptide, or an ADH2 polypeptide, or a GCN5-like polypeptide, is by introducing and expressing in a plant a nucleic acid encoding an LDOX polypeptide, or a YRP5 polypeptide, or a CK1 polypeptide, or a bHLH12-like polypeptide, or an ADH2 polypeptide, or a GCN5-like polypeptide; however the effects of performing the method, i.e. enhancing yield-related traits may also be achieved using other well known techniques, including but not limited to T-DNA activation tagging, TILLING, homologous recombination. A description of these techniques is provided in the definitions section.

[0433] The present invention also encompasses use of nucleic acids encoding LDOX polypeptides, or CK1 polypeptides, or bHLH12-like polypeptides, or ADH2 polypeptides, or

[0434] GCN5-like polypeptides, as described herein and use of these LDOX polypeptides in enhancing any of the aforementioned yield-related traits in plants.

[0435] The present invention also encompasses use of nucleic acids encoding YRP5 polypeptides as described herein and use of these YRP5 polypeptides in enhancing any of the aforementioned abiotic stresses in plants.

[0436] Nucleic acids encoding an LDOX polypeptide, or a YRP5 polypeptide, or a CK1 polypeptide, or a bHLH12-like polypeptide, or an ADH2 polypeptide, or a GCN5-like polypeptide, described herein, or the LDOX polypeptides, or YRP5 polypeptides, or CK1 polypeptides, or bHLH12-like polypeptides, or ADH2 polypeptides, or GCN5-like polypeptides, themselves, may find use in breeding programmes in which a DNA marker is identified which may be genetically linked to a gene encoding an LDOX polypeptide, or a YRP5 polypeptide, or a CK1 polypeptide, or a bHLH12-like polypeptide, or an ADH2 polypeptide, or a GCN5-like polypeptide. The nucleic acids/genes, or the LDOX polypeptides, or YRP5 polypeptides, or CK1 polypeptides, or bHLH12-like polypeptides, or ADH2 polypeptides, or GCN5-like polypeptides, themselves may be used to define a molecular marker. This DNA or protein marker may then be used in breeding programmes to select plants having enhanced yield-related traits and/or enhanced abiotic stress tolerance as defined hereinabove in the methods of the invention.

[0437] Allelic variants of a nucleic acid/gene encoding an LDOX polypeptide, or a YRP5 polypeptide, or a CK1 polypeptide, or a bHLH12-like polypeptide, or an ADH2 polypeptide, or a GCN5-like polypeptide, may also find use in marker-assisted breeding programmes. Such breeding programmes sometimes require introduction of allelic variation by mutagenic treatment of the plants, using for example EMS mutagenesis; alternatively, the programme may start with a collection of allelic variants of so called “natural” origin caused unintentionally. Identification of allelic variants then takes place, for example, by PCR. This is followed by a step for selection of superior allelic variants of the sequence in question and which give increased yield. Selection is typically carried out by monitoring growth performance of plants containing different allelic variants of the sequence in question. Growth performance may be monitored in a greenhouse or in the field. Further optional steps include crossing plants in which the superior allelic variant was identified with another plant. This could be used, for example, to make a combination of interesting phenotypic features.

[0438] Nucleic acids encoding LDOX polypeptides, or YRP5 polypeptides, or CK1 polypeptides, or bHLH12-like polypeptides, or ADH2 polypeptides, or GCN5-like polypeptides, may also be used as probes for genetically and physically mapping the genes that they are a part of, and as markers for traits linked to those genes. Such information may be useful in plant breeding in order to develop lines with desired phenotypes. Such use of nucleic acids encoding LDOX polypeptides, or YRP5 polypeptides, or CK1 polypeptides, or bHLH12-like polypeptides, or ADH2 polypeptides, or GCN5-like polypeptides, requires only a nucleic acid sequence of at least 15 nucleotides in length. The nucleic acids LDOX polypeptides, or YRP5 polypeptides, or CK1 polypeptides, or bHLH12-like polypeptides, or ADH2 polypeptides, or GCN5-like polypeptides, encoding may be used as restriction fragment length polymorphism (RFLP) markers. Southern blots (Sambrook J, Fritsch EF and Maniatis T (1989) Molecular Cloning, A Laboratory Manual) of restriction-digested plant genomic DNA may be probed with the nucleic acids encoding LDOX polypeptides, or YRP5 polypeptides, or CK1 polypeptides, or bHLH12-like polypeptides, or ADH2 polypeptides, or GCN5-like polypeptides. The resulting banding patterns may then be subjected to genetic analyses using computer programs such as MapMaker (Lander et al. (1987) Genomics 1: 174-181) in order to construct a genetic map. In addition, the nucleic acids may be used to probe Southern blots containing restriction endonuclease-treated genomic DNAs of a set of individuals representing parent and progeny of a defined genetic cross. Segregation of the DNA polymorphisms is noted and used to calculate the position of the nucleic acid encoding LDOX polypeptides, or YRP5 polypeptides, or CK1 polypeptides, or bHLH12-like polypeptides, or ADH2 polypeptides, or GCN5-like polypeptides, in the genetic map previously obtained using this population (Botstein et al. (1980) Am. J. Hum. Genet. 32:314-331).

[0439] The production and use of plant gene-derived probes for use in genetic mapping is described in Bernatzky and Tanksley (1986) Plant Mol. Biol. Reporter 4: 37-41. Numerous publications describe genetic mapping of specific cDNA clones using the methodology outlined above or variations thereof. For example, F2 intercross populations, backcross populations, randomly mated populations, near isogenic lines, and other sets of individuals may be used for mapping. Such methodologies are well known to those skilled in the art.

[0440] The production and use of plant gene-derived probes for use in genetic mapping is described in Bernatzky and Tanksley (1986) Plant Mol. Biol. Reporter 4: 37-41. Numerous publications describe genetic mapping of specific cDNA clones using the methodology outlined above or variations thereof. For example, F2 intercross populations, backcross populations, randomly mated populations, near isogenic lines, and other sets of individuals may be used for mapping. Such methodologies are well known to those skilled in the art.

[0441] The nucleic acid probes may also be used for physical mapping (i.e., placement of sequences on physical maps; see Hoheisel et al. In: Non-mammalian Genomic Analysis: A Practical Guide, Academic press 1996, pp. 319-346, and references cited therein).

[0442] In another embodiment, the nucleic acid probes may be used in direct fluorescence in situ hybridisation (FISH) mapping (Trask (1991) Trends Genet. 7:149-154). Although current methods of FISH mapping favour use of large clones (several kb to several hundred kb; see Laan et al. (1995) Genome Res. 5:13-20), improvements in sensitivity may allow performance of FISH mapping using shorter probes.

[0443] A variety of nucleic acid amplification-based methods for genetic and physical mapping may be carried out using the nucleic acids. Examples include allele-specific amplification (Kazazian (1989) J. Lab. Clin. Med. 11:95-96), polymorphism of PCR-amplified fragments (CAPS; Sheffield et al. (1993) Genomics 16:325-332), allele-specific ligation (Landegren et al. (1988) Science 241:1077-1080), nucleotide extension reactions (Sokolov (1990) Nucleic Acid Res. 18:3671), Radiation Hybrid Mapping (Walter et al. (1997) Nat. Genet. 7:22-28) and Happy Mapping (Dear and Cook (1989) Nucleic Acid Res. 17:6795-6807). For these methods, the sequence of a nucleic acid is used to design and produce primer pairs for use in the amplification reaction or in primer extension reactions. The design of such primers is well known to those skilled in the art. In methods employing PCR-based genetic mapping, it may be necessary to identify DNA sequence differences between the parents of the mapping cross in the region corresponding to the instant nucleic acid sequence. This, however, is generally not necessary for mapping methods.

[0444] The methods according to the present invention result in plants having enhanced yield-related traits and/or abiotic stress tolerance, as described hereinbefore. These traits may also be combined with other economically advantageous traits, such as further yield-enhancing traits and/or further abiotic or biotic stress tolerance-enhancing traits, tolerance to other abiotic and biotic stresses, enhanced yield-related traits, traits modifying various architectural features and/or biochemical and/or physiological features.

### Items

### 1. Leucoanthocyanidin Dioxygenase (LDOX) Polypeptides

[0445] 1. A method for enhancing yield-related traits in plants relative to control plants, comprising modulating expression in a plant of a nucleic acid encoding a leucoanthocyanidin dioxygenase (LDOX) polypeptide, wherein said LDOX polypeptide comprises an Isopenicillin N synthase domain (PRINTS entry PR00682) and a 20G-Fe(II) oxygenase domain (PFAM entry PF03171).
[0446] 2. Method according to item 1, wherein said LDOX polypeptide comprises one or more of the motifs 1 to 9 (SEQ ID NO: 173 to SEQ ID NO: 181).
[0447] 3. Method according to item 1 or 2, wherein said modulated expression is effected by introducing and expressing in a plant a nucleic acid encoding a LDOX polypeptide.
[0448] 4. Method according to any one of items 1 to 3, wherein said nucleic acid encoding a LDOX polypeptide encodes any one of the proteins listed in Table A1 or is a portion of such a nucleic acid, or a nucleic acid capable of hybridising with such a nucleic acid.
[0449] 5. Method according to any one of items 1 to 4, wherein said nucleic acid sequence encodes an orthologue or paralogue of any of the proteins given in Table A1.
[0450] 6. Method according to any preceding item, wherein said enhanced yield-related traits comprise increased early vigour and increased yield, preferably increased biomass and/or increased seed yield, relative to control plants.
[0451] 7. Method according to any one of items 1 to 6, wherein said enhanced yield-related traits are obtained under conditions of nitrogen deficiency.
[0452] 8. Method according to any one of items 3 to 7, wherein said nucleic acid is operably linked to a constitutive promoter, preferably to a GOS2 promoter, most preferably to a GOS2 promoter from rice.
[0453] 9. Method according to any one of items 1 to 8, wherein said nucleic acid encoding a LDOX polypeptide is of plant origin, preferably from a dicotyledonous plant, further preferably from the family Brassicaceae, more preferably from the genus Arabidopsis, most preferably from Arabidopsis thaliana.
[0454] 10. Plant or part thereof, including seeds, obtainable by a method according to any one of items 1 to 9, wherein said plant or part thereof comprises a recombinant nucleic acid encoding an LDOX polypeptide.
[0455] 11. Construct comprising:
   [0456] (i) nucleic acid encoding an LDOX polypeptide as defined in items 1 or 2;
   [0457] (ii) one or more control sequences capable of driving expression of the nucleic acid sequence of (a); and optionally
   [0458] (iii) a transcription termination sequence.
[0459] 12. Construct according to item 11, wherein one of said control sequences is a constitutive promoter, preferably a GOS2 promoter, most preferably a GOS2 promoter from rice.
[0460] 13. Use of a construct according to item 11 or 12 in a method for making plants having increased early vigour and increased yield, particularly increased biomass and/or increased seed yield, relative to control plants.
[0461] 14. Plant, plant part or plant cell transformed with a construct according to item 11 or 12.
[0462] 15. Method for the production of a transgenic plant having increased early vigour and increased yield, particularly increased biomass and/or increased seed yield, relative to control plants, comprising:
   [0463] (i) introducing and expressing in a plant a nucleic acid encoding an LDOX polypeptide as defined in item 1 or 2; and
   [0464] (ii) cultivating the plant cell under conditions promoting plant growth and development.
[0465] 16. Transgenic plant having increased early vigour and increased yield, particularly increased biomass and/or increased seed yield, relative to control plants, resulting from modulated expression of a nucleic acid encoding an LDOX polypeptide as defined in item 1 or 2, or a transgenic plant cell derived from said transgenic plant.
[0466] 17. Transgenic plant according to item 10, 14 or 16, or a transgenic plant cell derived thereof, wherein said plant is a crop plant or a monocot or a cereal, such as rice, maize, wheat, barley, millet, rye, triticale, sorghum emmer, spelt, secale, einkorn, teff, milo and oats.
[0467] 18. Harvestable parts of a plant according to item 17, wherein said harvestable parts are preferably shoot biomass, root biomass and/or seeds.
[0468] 19. Products derived from a plant according to item 17 and/or from harvestable parts of a plant according to item 18.
[0469] 20. Use of a nucleic acid encoding an LDOX polypeptide in increasing yield, particularly in increasing seed yield and/or shoot biomass in plants, relative to control plants.

### 2. YRP5 Polypeptides

[0470] 1. Method for enhancing abiotic stress tolerance in plants by modulating expression in a plant of a nucleic acid encoding a encoding a polypeptide represented by SEQ ID NO: 186 or SEQ ID NO: 188 or an orthologue or paralogue of either.
[0471] 2. Method according to item 1, wherein said modulated expression is effected by introducing and expressing in a plant a nucleic acid encoding YRP2 polypeptide.
[0472] 3. Method according to items 1 or 2, wherein said nucleic acid encoding a YRP5 polypeptide encodes any one of the proteins listed in Table A2 or is a portion of such a nucleic acid, or a nucleic acid capable of hybridising with such a nucleic acid.
[0473] 4. Method according to any one of items 1 to 3, wherein said nucleic acid sequence encodes an orthologue or paralogue of any of the proteins given in Table A2.
[0474] 5. Method according to items 3 or 4, wherein said nucleic acid is operably linked to a constitutive promoter, preferably to a GOS2 promoter, most preferably to a GOS2 promoter from rice.
[0475] 6. Method according to any one of items 1 to 5, wherein said nucleic acid encoding a YRP5 polypeptide is of Populus trichocarpa or Arabidopsis thaliana.
[0476] 7. Plant or part thereof, including seeds, obtainable by a method according to any one of items 1 to 6, wherein said plant or part thereof comprises a recombinant nucleic acid encoding a YRP5 polypeptide.
[0477] 8. Construct comprising:
   [0478] (i) nucleic acid encoding a YRP5 polypeptide as defined in items 1 or 2;
   [0479] (ii) one or more control sequences capable of driving expression of the nucleic acid sequence of (a); and optionally
   [0480] (iii) a transcription termination sequence.
[0481] 9. Construct according to item 8, wherein one of said control sequences is a constitutive promoter, preferably a GOS2 promoter, most preferably a GOS2 promoter from rice.
[0482] 10. Use of a construct according to item 8 or 9 in a method for making plants having increased abiotic stress tolerance relative to control plants.
[0483] 11. Plant, plant part or plant cell transformed with a construct according to item 8 or 9.
[0484] 12. Method for the production of a transgenic plant having increased abiotic stress tolerance relative to control plants, comprising:
   [0485] (i) introducing and expressing in a plant a nucleic acid encoding a YRP5 polypeptide; and
   [0486] (ii) cultivating the plant cell under conditions promoting abiotic stress.
[0487] 13. Transgenic plant having abiotic stress tolerance, relative to control plants, resulting from modulated expression of a nucleic acid encoding a YRP5 polypeptide, or a transgenic plant cell derived from said transgenic plant.
[0488] 14. Transgenic plant according to item 7, 11 or 13, or a transgenic plant cell derived thereof, wherein said plant is a crop plant or a monocot or a cereal, such as rice, maize, wheat, barley, millet, rye, triticale, sorghum, sugarcane, emmer, spelt, secale, einkorn, teff, milo and oats.
[0489] 15. Harvestable parts of a plant according to item 14, wherein said harvestable parts are preferably shoot biomass and/or seeds.
[0490] 16. Products derived from a plant according to item 14 and/or from harvestable parts of a plant according to item 15.
[0491] 17. Use of a nucleic acid encoding a YRP5 polypeptide in increasing yield, particularly in increasing abiotic stress tolerance, relative to control plants.

### 3. Casein Kinase Type I (CK1) Polypeptides

[0492] 1. A method for enhancing yield-related traits in plants relative to control plants, comprising modulating expression in a plant of a nucleic acid encoding a Casein Kinase 1, CK1, polypeptide.
[0493] 2. Method according to item 1, wherein said CK1 polypeptide comprises a protein motif having 50%, 51%, 52%, 53%, 54%, 55%, 56%, 57%, 58%, 59%, 60%, 61%, 62%, 63%, 64%, 65%, 66%, 67%, 68%, 69%, 70%, 71%, 72%, 73%, 74%, 75%, 76%, 77%, 78%, 79%, 80%, 81%, 82%, 83%, 84%, 85%, 86%, 87%, 88%, 89%, 90%, 91%, 92%, 93%, 94%, 95%, 96%, 97%, 98%, or 99% sequence identity one or more of the following motifs:

(SEQ ID NO: 276)
(i) Motif 13:
KANQVY(IV)ID(YF)GLAKKYRDLQTH(KR)HIPYRENKNLTGTARYAS
VNTHLG(VI)EQ,
(SEQ ID NO: 277)
(ii) Motif 14:
CKSYPSEF(VTI)SYFHYCRSLRFEDKPDYSYLKRLFRDLFIREGYQFD
YVFDW,
(SEQ ID NO: 278)
(iii) Motif 15:
PSLEDLFNYC(NS)RK(FL)(ST)LKTVLMLADQ(LM)INRVEYMHSRGF
LHRDIKPDNFLM

[0494] wherein amino acid residues between brackets represent alternative amino acids at that position.
[0495] 3. Method according to item 1 or 2, wherein said modulated expression is effected by introducing and expressing in a plant a nucleic acid encoding a CK1 polypeptide.
[0496] 4. Method according to any one of items 1 to 3, wherein said nucleic acid encoding a CK1 polypeptide encodes any one of the proteins listed in Table A3 or is a portion of such a nucleic acid, or a nucleic acid capable of hybridising with such a nucleic acid.
[0497] 5. Method according to any one of items 1 to 4, wherein said nucleic acid sequence encodes an orthologue or paralogue of any of the proteins given in Table A3.
[0498] 6. Method according to any preceding item, wherein said enhanced yield-related traits comprise increased yield, preferably increased biomass and/or increased seed yield relative to control plants.
[0499] 7. Method according to any one of items 1 to 6, wherein said enhanced yield-related traits are obtained under non-stress conditions.
[0500] 8. Method according to any one of items 1 to 6, wherein said enhanced yield-related traits are obtained under conditions of drought stress, salt stress or nitrogen deficiency.
[0501] 9. Method according to any one of items 3 to 8, wherein said nucleic acid is operably linked to a constitutive promoter, preferably to a GOS2 promoter, most preferably to a GOS2 promoter from rice.
[0502] 10. Method according to any one of items 1 to 9, wherein said nucleic acid encoding a CK1 polypeptide is of plant origin, preferably from a dicotyledonous plant, further preferably from the family Brassicaceae, more preferably from the genus Arabidopsis, most preferably from Arabidopsis thaliana.
[0503] 11. Plant or part thereof, including seeds, obtainable by a method according to any one of items 1 to 10, wherein said plant or part thereof comprises a recombinant nucleic acid encoding a CK1 polypeptide.
[0504] 12. Construct comprising:
   [0505] (i) nucleic acid encoding a CK1 polypeptide as defined in items 1 or 2;
   [0506] (ii) one or more control sequences capable of driving expression of the nucleic acid sequence of (a); and optionally
   [0507] (iii) a transcription termination sequence.
[0508] 13. Construct according to item 12, wherein one of said control sequences is a constitutive promoter, preferably a GOS2 promoter, most preferably a GOS2 promoter from rice.
[0509] 14. Use of a construct according to item 12 or 13 in a method for making plants having increased yield, particularly increased biomass and/or increased seed yield relative to control plants.
[0510] 15. Plant, plant part or plant cell transformed with a construct according to item 12 or 13.
[0511] 16. Method for the production of a transgenic plant having increased yield, particularly increased biomass and/or increased seed yield relative to control plants, comprising:
   [0512] (i) introducing and expressing in a plant a nucleic acid encoding a CK1 polypeptide as defined in item 1 or 2; and
   [0513] (ii) cultivating the plant cell under conditions promoting plant growth and development.
[0514] 17. Transgenic plant having increased yield, particularly increased biomass and/or increased seed yield, relative to control plants, resulting from modulated expression of a nucleic acid encoding a CK1 polypeptide as defined in item 1 or 2, or a transgenic plant cell derived from said transgenic plant.
[0515] 18. Transgenic plant according to item 11, 15 or 17, or a transgenic plant cell derived thereof, wherein said plant is a crop plant or a monocot or a cereal, such as rice, maize, wheat, barley, millet, rye, triticale, sorghum emmer, spelt, secale, einkorn, teff, milo and oats.
[0516] 19. Harvestable parts of a plant according to item 18, wherein said harvestable parts are preferably shoot biomass and/or seeds.
[0517] 20. Products derived from a plant according to item 18 and/or from harvestable parts of a plant according to item 19.
[0518] 21. Use of a nucleic acid encoding a CK1 polypeptide in increasing yield, particularly in increasing seed yield and/or shoot biomass in plants, relative to control plants.
[0519] 22. An isolated nucleic acid molecule selected from:
   [0520] (i) a nucleic acid represented by any one of SEQ ID NO: 210, 212, 216, 220, 228 and 268;
   [0521] (ii) the complement of a nucleic acid represented by any one of SEQ ID NO: 210, 212, 216, 220, 228 and 268;
   [0522] (ii) a nucleic acid encoding the polypeptide as represented by any one of SEQ ID NO: 211, 213, 217, 221, 229 and 269 preferably as a result of the degeneracy of the genetic code, said isolated nucleic acid can be derived from a polypeptide sequence as represented by any one of SEQ ID NO: 211, 213, 217, 221, 229 and 269 and further preferably confers enhanced yield-related traits relative to control plants;
[0523] 1. a nucleic acid having, in increasing order of preference at least 30%, 31%, 32%, 33%, 34%, 35%, 36%, 37%, 38%, 39%, 40%, 41%, 42%, 43%, 44%, 45%, 46%, 47%, 48%, 49%, 50%, 51%, 52%, 53%, 54%, 55%, 56%, 57%, 58%, 59%, 60%, 61%, 62%, 63%, 64%, 65%, 66%, 67%, 68%, 69%, 70%, 71%, 72%, 73%, 74%, 75%, 76%, 77%, 78%, 79%, 80%, 81%, 82%, 83%, 84%, 85%, 86%, 87%, 88%, 89%, 90%, 91%, 92%, 93%, 94%, 95%, 96%, 97%, 98%, or 99% sequence identity with any of the nucleic acid sequences of Table A3 and further preferably conferring enhanced yield-related traits relative to control plants;
[0524] 2. a nucleic acid molecule which hybridizes with a nucleic acid molecule of (i) to (iv) under stringent hybridization conditions and preferably confers enhanced yield-related traits relative to control plants;
[0525] 3. a nucleic acid encoding a Calreticulin polypeptide having, in increasing order of preference, at least 50%, 51%, 52%, 53%, 54%, 55%, 56%, 57%, 58%, 59%, 60%, 61%, 62%, 63%, 64%, 65%, 66%, 67%, 68%, 69%, 70%, 71%, 72%, 73%, 74%, 75%, 76%, 77%, 78%, 79%, 80%, 81%, 82%, 83%, 84%, 85%, 86%, 87%, 88%, 89%, 90%, 91%, 92%, 93%, 94%, 95%, 96%, 97%, 98%, or 99% sequence identity to the amino acid sequence represented by any one of SEQ ID NO: 211, 213, 217, 221, 229 and 269 and any of the other amino acid sequences in Table A3 and preferably conferring enhanced yield-related traits relative to control plants.
[0526] 23. An isolated polypeptide selected from:
   [0527] (i) an amino acid sequence represented by any one of SEQ ID NO: 211, 213, 217, 221, 229 and 269;
   [0528] (ii) an amino acid sequence having, in increasing order of preference, at least 50%, 51%, 52%, 53%, 54%, 55%, 56%, 57%, 58%, 59%, 60%, 61%, 62%, 63%, 64%, 65%, 66%, 67%, 68%, 69%, 70%, 71%, 72%, 73%, 74%, 75%, 76%, 77%, 78%, 79%, 80%, 81%, 82%, 83%, 84%, 85%, 86%, 87%, 88%, 89%, 90%, 91%, 92%, 93%, 94%, 95%, 96%, 97%, 98%, or 99% sequence identity to the amino acid sequence represented by any one of SEQ ID NO: 211, 213, 217, 221, 229 and 269 and any of the other amino acid sequences in Table A3 and preferably conferring enhanced yield-related traits relative to control plants.
   [0529] (iii) derivatives of any of the amino acid sequences given in (i) or (ii) above.
      4. Basic Helix Loop Helix Group 12 (bHLH12-Like) Polypeptides
[0530] 1. A method for enhancing yield-related traits in plants relative to control plants, comprising modulating expression in a plant of a nucleic acid encoding a basic Helix Loop Helix group 12, bHLH12-like polypeptide.
[0531] 2. Method according to item 1, wherein said bHLH12-like polypeptide comprises a protein motif having 50%, 51%, 52%, 53%, 54%, 55%, 56%, 57%, 58%, 59%, 60%, 61%, 62%, 63%, 64%, 65%, 66%, 67%, 68%, 69%, 70%, 71%, 72%, 73%, 74%, 75%, 76%, 77%, 78%, 79%, 80%, 81%, 82%, 83%, 84%, 85%, 86%, 87%, 88%, 89%, 90%, 91%, 92%, 93%, 94%, 95%, 96%, 97%, 98%, or 99% sequence identity one or more of sequence identity one or more of motifs 16 to 19 (SEQ ID NO: 404 to 407).
[0532] 3. Method according to item 1 or 2, wherein said modulated expression is effected by introducing and expressing in a plant a nucleic acid encoding a bHLH12-like polypeptide.
[0533] 4. Method according to any one of items 1 to 3, wherein said nucleic acid encoding a bHLH12-like polypeptide encodes any one of the proteins listed in Table A4 or is a portion of such a nucleic acid, or a nucleic acid capable of hybridising with such a nucleic acid.
[0534] 5. Method according to any one of items 1 to 4, wherein said nucleic acid sequence encodes an orthologue or paralogue of any of the proteins given in Table A4.
[0535] 6. Method according to any preceding item, wherein said enhanced yield-related traits comprise increased yield, preferably increased biomass and/or increased seed yield relative to control plants.
[0536] 7. Method according to any one of items 1 to 6, wherein said enhanced yield-related traits are obtained under non-stress conditions.
[0537] 8. Method according to any one of items 1 to 6, wherein said enhanced yield-related traits are obtained under conditions of drought stress, salt stress or nitrogen deficiency.
[0538] 9. Method according to any one of items 3 to 8, wherein said nucleic acid is operably linked to a constitutive promoter, preferably to a GOS2 promoter, most preferably to a GOS2 promoter from rice.
[0539] 10. Method according to any one of items 1 to 9, wherein said nucleic acid encoding a bHLH12-like polypeptide is of plant origin, preferably from a dicotyledonous plant, further preferably from the family Brassicaceae, more preferably from the genus Arabidopsis, most preferably from Arabidopsis thaliana.
[0540] 11. Plant or part thereof, including seeds, obtainable by a method according to any one of items 1 to 10, wherein said plant or part thereof comprises a recombinant nucleic acid encoding a bHLH12-like polypeptide.
[0541] 12. Construct comprising:
   [0542] (i) nucleic acid encoding a bHLH12-like polypeptide as defined in items 1 or 2;
   [0543] (ii) one or more control sequences capable of driving expression of the nucleic acid sequence of (a); and optionally
   [0544] (iii) a transcription termination sequence.
[0545] 13. Construct according to item 12, wherein one of said control sequences is a constitutive promoter, preferably a GOS2 promoter, most preferably a GOS2 promoter from rice.
[0546] 14. Use of a construct according to item 12 or 13 in a method for making plants having increased yield, particularly increased biomass and/or increased seed yield relative to control plants.
[0547] 15. Plant, plant part or plant cell transformed with a construct according to item 12 or 13.
[0548] 16. Method for the production of a transgenic plant having increased yield, particularly increased biomass and/or increased seed yield relative to control plants, comprising:
   [0549] (i) introducing and expressing in a plant a nucleic acid encoding a bHLH12-like polypeptide as defined in item 1 or 2; and
   [0550] (ii) cultivating the plant cell under conditions promoting plant growth and development.
[0551] 17. Transgenic plant having increased yield, particularly increased biomass and/or increased seed yield, relative to control plants, resulting from modulated expression of a nucleic acid encoding a bHLH12-like polypeptide as defined in item 1 or 2, or a transgenic plant cell derived from said transgenic plant.
[0552] 18. Transgenic plant according to item 11, 15 or 17, or a transgenic plant cell derived thereof, wherein said plant is a crop plant or a monocot or a cereal, such as rice, maize, wheat, barley, millet, rye, triticale, sorghum emmer, spelt, secale, einkorn, teff, milo and oats.
[0553] 19. Harvestable parts of a plant according to item 18, wherein said harvestable parts are preferably shoot biomass and/or seeds.
[0554] 20. Products derived from a plant according to item 18 and/or from harvestable parts of a plant according to item 19.
[0555] 21. Use of a nucleic acid encoding a bHLH12-like polypeptide in increasing yield, particularly in increasing seed yield and/or shoot biomass in plants, relative to control plants.
[0556] 22. An isolated nucleic acid molecule selected from:
   [0557] (i) a nucleic acid represented by any one of SEQ ID NO: 279 and 335;
   [0558] (ii) the complement of a nucleic acid represented by any one of SEQ ID NO: 279 and 335;
   [0559] (iii) a nucleic acid encoding the polypeptide as represented by any one of SEQ ID NO: 280 and 336 preferably as a result of the degeneracy of the genetic code, said isolated nucleic acid can be derived from a polypeptide sequence as represented by any one of SEQ ID NO: 280 and 336 and further preferably confers enhanced yield-related traits relative to control plants;
   [0560] (iv) a nucleic acid having, in increasing order of preference at least 30%, 31%, 32%, 33%, 34%, 35%, 36%, 37%, 38%, 39%, 40%, 41%, 42%, 43%, 44%, 45%, 46%, 47%, 48%, 49%, 50%, 51%, 52%, 53%, 54%, 55%, 56%, 57%, 58%, 59%, 60%, 61%, 62%, 63%, 64%, 65%, 66%, 67%, 68%, 69%, 70%, 71%, 72%, 73%, 74%, 75%, 76%, 77%, 78%, 79%, 80%, 81%, 82%, 83%, 84%, 85%, 86%, 87%, 88%, 89%, 90%, 91%, 92%, 93%, 94%, 95%, 96%, 97%, 98%, or 99% sequence identity with any of the nucleic acid sequences of Table A4 and further preferably conferring enhanced yield-related traits relative to control plants;
   [0561] (v) a nucleic acid molecule which hybridizes with a nucleic acid molecule of (i) to (iv) under stringent hybridization conditions and preferably confers enhanced yield-related traits relative to control plants;
   [0562] (vi) a nucleic acid encoding a bHLH12-like polypeptide having, in increasing order of preference, at least 50%, 51%, 52%, 53%, 54%, 55%, 56%, 57%, 58%, 59%, 60%, 61%, 62%, 63%, 64%, 65%, 66%, 67%, 68%, 69%, 70%, 71%, 72%, 73%, 74%, 75%, 76%, 77%, 78%, 79%, 80%, 81%, 82%, 83%, 84%, 85%, 86%, 87%, 88%, 89%, 90%, 91%, 92%, 93%, 94%, 95%, 96%, 97%, 98%, or 99% sequence identity to the amino acid sequence represented by any one of SEQ ID NO: 280 and 336 and any of the other amino acid sequences in Table A4 and preferably conferring enhanced yield-related traits relative to control plants.
[0563] 23. An isolated polypeptide selected from:
   [0564] (i) an amino acid sequence represented by any one of SEQ ID NO: 280 and 336;
   [0565] (ii) an amino acid sequence having, in increasing order of preference, at least 50%, 51%, 52%, 53%, 54%, 55%, 56%, 57%, 58%, 59%, 60%, 61%, 62%, 63%, 64%, 65%, 66%, 67%, 68%, 69%, 70%, 71%, 72%, 73%, 74%, 75%, 76%, 77%, 78%, 79%, 80%, 81%, 82%, 83%, 84%, 85%, 86%, 87%, 88%, 89%, 90%, 91%, 92%, 93%, 94%, 95%, 96%, 97%, 98%, or 99% sequence identity to the amino acid sequence represented by any one of SEQ ID NO: 280 and 336 and any of the other amino acid sequences in Table A4 and preferably conferring enhanced yield-related traits relative to control plants.
   [0566] (iii) derivatives of any of the amino acid sequences given in (i) or (ii) above.

### 5. Alcohol Dehydrogenase (ADH2) Polypeptides

[0567] 1. A method for enhancing yield-related traits in plants relative to control plants, comprising modulating expression in a plant of a nucleic acid encoding an ADH2 polypeptide, wherein said ADH2 polypeptide comprises:
   [0568] (i) GROES Domain (Domain 1): AGEVRVKILFTALCHTDHYTWSGKDPEGLFPCILGHEAAGVVESVGEGVTEVQ PGDHVIPCYQAECKECKFCKSGKTNLCGKVRGATGVGVMMNDMKSRFSVNG KPIYHFTGTSTFSQYTVVHDVSVAKI, or a domain having in increasing order of preference at least 50%, 55%, 60%, 65%, 70%, 75%, 80%, 85%, 90%, 95% or more sequence identity to Domain 1; and
   [0569] (ii) Zinc-binding dehydrogenase domain (Domain 2): AGSIVAVFGLGTVGLAVAEGAKAAGASRIIGIDIDNKKFDVAKNFGVTEFVNPKD HDKPIQQVLVDLTDGGVDYSFECIGNVSVMRAALECCHKDWGTSVIVGVAASG QEIATRPFQLVTGRVWKGTAFGGFKSRTQVPWLVD, or a domain having in increasing order of preference at least 50%, 55%, 60%, 65%, 70%, 75%, 80%, 85%, 90%, 95% or more sequence identity to Domain 2; and optionally in addition (iii) DUF61 Domain (Domain 3): VDKYMNKEVK, or a domain having in increasing order of preference at least 50%, 55%, 60%, 65%, 70%, 75%, 80%, 85%, 90%, 95% or more sequence identity to Domain 3.
[0570] 2. Method according to item 1, wherein said ADH2 polypeptide comprises one or more of Motifs 20 to 30, or a Motif having in increasing order of preference at least 50%, 55%, 60%, 65%, 70%, 75%, 80%, 85%, 90%, 95% or more sequence identity to Domain III any one of Motifs 20 to 30:

(SEQ ID NO: 445)
Motif 20: HYTWSGKDP;
(SEQ ID NO: 446)
Motif 21: PCYQAECK;
(SEQ ID NO: 447)
Motif 22: GKTNLCGKVRGATGVGVMMND;
(SEQ ID NO: 448)
Motif 23: YHFMGTSTFSQYTVVHDVSVAKINPQAPLDKVCLLGCGVP
TGLG;
(SEQ ID NO: 449)
Motif 24: WNTAKVEAGSIVAVFGLGTVGLAVAEG;
(SEQ ID NO: 450)
Motif 25: GASRIIGIDIDNKKFDVAKNFGVTEFVN;
(SEQ ID NO: 451)
Motif 26: KDHDKPIQLVLVDIAD;
(SEQ ID NO: 452)
Motif 27: SVRRAAEEC;
(SEQ ID NO: 453)
Motif 28: WGTSVIVGVAASGQEIATRPFQLVTGRVWKGTAFGGF;
(SEQ ID NO: 454)
Motif 29: KVDEYITH;
(SEQ ID NO: 455)
Motif 30: MLKGESIRCIITM.

[0571] 3. Method according to item 1 or 2, wherein said modulated expression is effected by introducing and expressing in a plant a nucleic acid encoding an ADH2 polypeptide.
[0572] 4. Method according to any one of items 1 to 3, wherein said nucleic acid encoding an ADH2 polypeptide encodes any one of the proteins listed in Table A5 or is a portion of such a nucleic acid, or a nucleic acid capable of hybridising with such a nucleic acid.
[0573] 5. Method according to any one of items 1 to 4, wherein said nucleic acid sequence encodes an orthologue or paralogue of any of the proteins given in Table A5.
[0574] 6. Method according to any preceding item, wherein said enhanced yield-related traits comprise increased yield, preferably increased biomass and/or increased seed yield relative to control plants.
[0575] 7. Method according to any one of items 1 to 6, wherein said enhanced yield-related traits are obtained under non-stress conditions.
[0576] 8. Method according to any one of items 3 to 7, wherein said nucleic acid is operably linked to a seed-specific promoter, preferably to a promoter, most preferably to a putative proteinase inhibitor promoter from rice.
[0577] 9. Method according to any one of items 1 to 8, wherein said nucleic acid encoding a ADH2 polypeptide is of plant origin, preferably from a monocotyledonous plant, further preferably from the genus Saccharum, most preferably from Saccharum officinarum.
[0578] 10. Plant or part thereof, including seeds, obtainable by a method according to any one of items 1 to 9, wherein said plant or part thereof comprises a recombinant nucleic acid encoding an ADH2 polypeptide.
[0579] 11. Construct comprising:
   [0580] (i) nucleic acid encoding an ADH2 polypeptide as defined in items 1 or 2;
   [0581] (ii) one or more control sequences capable of driving expression of the nucleic acid sequence of (a); and optionally
   [0582] (iii) a transcription termination sequence.
[0583] 12. Construct according to item 11, wherein one of said control sequences is a seed-specific promoter, preferably a putative proteinase inhibitor promoter, most preferably a putative proteinase inhibitor promoter from rice.
[0584] 13. Use of a construct according to item 11 or 12 in a method for making plants having increased yield, particularly increased biomass and/or increased seed yield relative to control plants.
[0585] 14. Plant, plant part or plant cell transformed with a construct according to item 11 or 12.
[0586] 15. Method for the production of a transgenic plant having increased yield, particularly increased biomass and/or increased seed yield relative to control plants, comprising:
   [0587] (i) introducing and expressing in a plant a nucleic acid encoding an ADH2 polypeptide as defined in item 1 or 2; and
   [0588] (ii) cultivating the plant cell under conditions promoting plant growth and development.
[0589] 16. Transgenic plant having increased yield, particularly increased biomass and/or increased seed yield, relative to control plants, resulting from modulated expression of a nucleic acid encoding an ADH2 polypeptide as defined in item 1 or 2, or a transgenic plant cell derived from said transgenic plant.
[0590] 17. Transgenic plant according to item 10, 14 or 16, or a transgenic plant cell derived thereof, wherein said plant is a crop plant or a monocot or a cereal, such as rice, maize, wheat, barley, millet, rye, triticale, sorghum emmer, spelt, secale, einkorn, teff, milo and oats.
[0591] 18. Harvestable parts of a plant according to item 18, wherein said harvestable parts are preferably shoot biomass and/or seeds.
[0592] 19. Products derived from a plant according to item 17 and/or from harvestable parts of a plant according to item 18.
[0593] 20. Use of a nucleic acid encoding an ADH2 polypeptide as defined in item 1 or 2 in increasing yield, particularly in increasing seed yield and/or biomass in plants, relative to control plants.

### 6. GCN5-Like Polypeptides

[0594] 1. A method for enhancing yield-related traits in plants relative to control plants, comprising modulating expression in a plant of a nucleic acid encoding a GCN5-like polypeptide, wherein said polypeptide comprises two domains with PFam accession numbers PF00583 and PF00439.
[0595] 2. Method according to item 1, wherein said GCN5 polypeptide also comprises the following motifs:

(SEQ ID NO: 501)
(i) Motif 31:
LKF[VL]C[YL]SNDGVD[EQ]HM[IV]WL[IV]GLKNIFARQLPNMPKE
YIVRLVMDR[ST]HKS[MV]M,
(SEQ ID NO: 502)
(ii) Motif 32:
FGEIAFCAITADEQVKGYGTRLMNHLKQ[HY]ARD[AV]DGLTHFLTYAD
NNAVGY,
(SEQ ID NO: 503)
(iii) Motif 33:
H[AP]DAWPFKEPVD[SA]RDVPDYYDIIKDP[IM]DLKT[MI]S[KR]R
V[ED]SEQYYVTLEMFVA.

[0596] 3. Method, according to item 1 or 2, wherein said GCN5 polypeptide may also comprise any one or more of the following motifs:

(SEQ ID NO: 504)
(i) Motif 34:
LKF[LV]C[YL]SNDG[VI]DEHM[IV]WL[IV]GLKNIFARQLPNMPKE
YIVRLVMDR[TS]HKS[MV]M,
(SEQ ID NO: 505)
(ii) Motif 35:
FGEIAFCAITADEQVKGYGTRLMNHLKQHARD[AVM]DGLTHFLTYAD
NNAVGY,
(SEQ ID NO: 506)
(iii) Motif 36:
KQGFTKEI[THY][LF][DE]K[ED]RW[QH]GYIKDYDGGILMECKID
[PQ]KLPY[TV]DL[AS]TMIRRQRQ.

[0597] 4. Method, according to item 1 to 3, wherein said GCN5 polypeptide may also comprise any one or more of the following motifs:

(SEQ ID NO: 507)
(i) Motif 37:
LKFVC[LY]SND[GDS][VI]DEHM[VM][WCR]LIGLKNIFARQLPNMP
KEYIVRL[VL]MDR[SGK]HKSVM,
(SEQ ID NO: 508)
(ii) Motif 38:
CAITADEQVKGYGTRLMNHLKQ[HFY]ARD[MV]DGLTHFLTYADNNAV
GYF[IV]KQGF,
(SEQ ID NO: 509)
(iii) Motif 39:
W[QH]G[YF]IKDYDGG[IL]LMECKID[PQ]KL[PS]YTDLS[TS]MIR
[RQ]QR[QK]AIDE[KR]IRELS NC[HQ][IN].

[0598] 5. Method, according to item 1 to 4, wherein said GCN5 polypeptide may also comprise any one or more of the followina motifs:

(SEQ ID NO: 510)
(i) Motif 40:
FLCYSNDGVDEHMIWLVGLKNIFARQLPNMPKEYIVRLVMDRTHKSM
MVI,
(SEQ ID NO: 511)
(ii) Motif 41:
MNHLKQHARDADGLTHFLTYADNNAVGY[FL]VKQGFTKEIT[LF]DKER
WQGYIK,
(SEQ ID NO: 512)
(iii) Motif 42:
IR[ED]LSNCHIVY[SP]GIDFQKKEAGIPRR[LT][MI]KPEDI[PQ]G
LREAGWTPDQ[WL]GHSK.

[0599] 6. Method, according to item 1 or 2, wherein said modulated expression is effected by introducing and expressing in a plant a nucleic acid encoding a GCN5 polypeptide as defined in any of the previous items.
[0600] 7. Method according to any one of items 1 to 6, wherein said nucleic acid encoding a GCN5 polypeptide encodes any one of the proteins listed in Table A6 or is a portion of such a nucleic acid, or a nucleic acid capable of hybridising with such a nucleic acid.
[0601] 8. Method according to any one of items 1 to 7, wherein said nucleic acid sequence encodes an orthologue or paralogue of any of the proteins given in Table A6.
[0602] 9. Method according to any preceding item, wherein said enhanced yield-related traits comprise increased yield, preferably increased biomass and/or increased seed yield relative to control plants.
[0603] 10. Method according to any one of items 1 to 9, wherein said enhanced yield-related traits are obtained under non-stress conditions.
[0604] 11. Method according to any one of items 1 to 9, wherein said enhanced yield-related traits are obtained under conditions of drought stress, salt stress or nitrogen deficiency.
[0605] 12. Method according to any one of items 6 to 8, wherein said nucleic acid is operably linked to a constitutive promoter, preferably to a GOS2 promoter, most preferably to a GOS2 promoter from rice.
[0606] 13. Method according to any one of items 1 to 12, wherein said nucleic acid encoding a GCN5 polypeptide is of plant origin, preferably from a dicotyledonous plant, further preferably from the family Brassicaceae, more preferably from the genus Arabidopsis, most preferably from Arabidopsis thaliana.
[0607] 14. Plant or part thereof, including seeds, obtainable by a method according to any one of items 1 to 13, wherein said plant or part thereof comprises a recombinant nucleic acid encoding a GCN5 polypeptide.
[0608] 15. Construct comprising:
   [0609] (i) nucleic acid encoding a GCN5 polypeptide as defined in items 1 to 5;
   [0610] (ii) one or more control sequences capable of driving expression of the nucleic acid sequence of (a); and optionally
   [0611] (iii) a transcription termination sequence.
[0612] 16. Construct according to item 15, wherein one of said control sequences is a constitutive promoter, preferably a GOS2 promoter, most preferably a GOS2 promoter from rice.
[0613] 17. Use of a construct according to items 15 or 16 in a method for making plants having increased yield, particularly increased biomass and/or increased seed yield relative to control plants.
[0614] 18. Plant, plant part or plant cell transformed with a construct according to items 15 or 16.
[0615] 19. Method for the production of a transgenic plant having increased yield, particularly increased biomass and/or increased seed yield relative to control plants, comprising:
   [0616] (i) introducing and expressing in a plant a nucleic acid encoding a GCN5 polypeptide as defined in items 1 to 5; and
   [0617] (ii) cultivating the plant cell under conditions promoting plant growth and development.
[0618] 20. Transgenic plant having increased yield, particularly increased biomass and/or increased seed yield, relative to control plants, resulting from modulated expression of a nucleic acid encoding a GCN5 polypeptide as defined in items 1 to 5, or a transgenic plant cell derived from said transgenic plant.
[0619] 21. Transgenic plant according to item 18, 19 or 21, or a transgenic plant cell derived thereof, wherein said plant is a crop plant or a monocot or a cereal, such as rice, maize, wheat, barley, millet, rye, triticale, sorghum emmer, spelt, secale, einkorn, teff, milo and oats.
[0620] 22. Harvestable parts of a plant according to item 21, wherein said harvestable parts are preferably shoot biomass and/or seeds.
[0621] 23. Products derived from a plant according to item 21 and/or from harvestable parts of a plant according to item 22.
[0622] 24. Use of a nucleic acid encoding a GCN5 polypeptide in increasing yield, particularly in increasing seed yield and/or shoot biomass in plants, relative to control plants.

### DESCRIPTION OF FIGURES

[0623] The present invention will now be described with reference to the following figures in which: FIG. 1 Anthocyanin and PA synthesis pathway in Arabidopsis (Abrahams et al., 2003). The anthocyanin and PA pathway from chalcone synthase is shown. The enzymes LDOX and BAN act on leucocyanidin and cyanidin respectively, to produce epicatechin. Catechin synthesis (dashed line) has so far not be demonstrated in Arabidopsis. Abbreviations used: CHS, chalcone synthase; CHI, chalcone isomerise; F3H, flavanone 3-3-hydroxylase; F3′H, flavonoid 3′ hydroxylase; FLS, flavonol synthase; DFR, dihydroflavonol 4-reductase, LDOX, leucoanthocyanidin dioxygenase; BAN, anthocyanidin reductase; UFGT, UDP glucose-flavonoid 3-O-glucosyl transferase.

[0624] FIG. 2 represents the domain structure of SEQ ID NO: 2 with the conserved domains Isopenicillin Synthase (in bold) and 20G-Fe(II) Oxygenase (in italics), and the motifs (underlined and numbered).

[0625] FIG. 3 represents a multiple alignment of various LDOX polypeptides, the identifiers correspond to those used in the sequence listing.

[0626] FIG. 4 shows phylogenetic tree of LDOX polypeptides.

[0627] FIG. 5 represents the binary vector used for increased expression in Oryza sativa of a LDOX-encoding nucleic acid under the control of a rice GOS2 promoter (pGOS2).

[0628] FIG. 6 represents the binary vector used for increased expression in Oryza sativa of a YRP5-encoding nucleic acid under the control of a rice GOS2 promoter (pGOS2).

[0629] FIG. 7 represents a multiple alignment of the plant CK1 polypeptides of Table A3.

[0630] FIG. 8 represents the binary vector used for increased expression in Oryza sativa of a CK1-encoding nucleic acid under the control of a rice GOS2 promoter (pGOS2).

[0631] FIG. 9 represents a multiple alignment of the plant bHLH12-like polypeptides of Table A4. Position of Motif 16 to 19 and bHLH domain in the polypeptides of the Alignment is shown.

[0632] FIG. 10 represents the binary vector used for increased expression in Oryza sativa of a bHLH12-like-encoding nucleic acid under the control of a rice GOS2 promoter (pGOS2).

[0633] FIG. 11 represents a multiple alignment of the plant ADH2-like polypeptides.

[0634] FIG. 12 is a reproduction of FIG. 3 of Kavanagh et al., Cell Mol Life Sci. 2008 December; 65(24):3895-3906.

[0635] FIG. 13 represents the binary vector used for increased expression in Oryza sativa of an ADH2-encoding nucleic acid under the control of a rice putative proteinase inhibitor promoter.

[0636] FIG. 14 represents the overall structure of the GCN5 in vertebrates, Drosophila and yeast. Schematic representation and domain organization of the GCN5 from human (hs; Homo sapiens), chicken (gg; Gallus gallus), zebrafish (dr; Danio rerio), pufferfish (tn; Tetraodon nigroviridis), Drosophila melanogaster (dm) and yeast (sc; Saccharomyces cerevisiae) are shown. The AT domain is shown in black and the bromo domain (Bromo) is shaded. The numbers over the boxes indicate amino-acid positions. The identity between the different factors is indicated in % on the right of the horizontal lines, representing the pair wise comparisons. AT means “acetyl transferase”.

[0637] FIG. 15 represents the Phylogenetic tree of selected GCN5 proteins for the different clades: monocot Glade, dicot Glade, higher vascular plant Glade, vascular plant Glade, plant Glade and eukaryote Glade. The alignment was generated using MAFFT (Katoh and Toh (2008) Briefings in Bioinformatics 9:286-298). A neighbour-joining tree was calculated using QuickTree (Howe et al. (2002), Bioinformatics 18(11): 1546-7), 100 bootstrap repetitions. The circular phylogram was drawn using Dendroscope (Huson et al. (2007), BMC Bioinformatics 8(1):460). Confidence for 100 bootstrap repetitions is indicated for major branching. Major branching position is indicated by circles.

[0638] FIG. 16 represents the binary vector used for increased expression in Oryza sativa of a GCN5-encoding nucleic acid under the control of a rice GOS2 promoter (pGOS2).

### EXAMPLES

[0639] The present invention will now be described with reference to the following examples, which are by way of illustration alone. The following examples are not intended to completely define or otherwise limit the scope of the invention.

[0640] DNA manipulation: unless otherwise stated, recombinant DNA techniques are performed according to standard protocols described in (Sambrook (2001) Molecular Cloning: a laboratory manual, 3rd Edition Cold Spring Harbor Laboratory Press, CSH, New York) or in Volumes 1 and 2 of Ausubel et al. (1994), Current Protocols in Molecular Biology, Current Protocols. Standard materials and methods for plant molecular work are described in Plant Molecular Biology Labfax (1993) by R.D.D. Croy, published by BIOS Scientific Publications Ltd (UK) and Blackwell Scientific Publications (UK).

### Example 1

### Identification of Sequences Related to the Nucleic Acid Sequence Used in the Methods of the Invention

[0641] Sequences (full length cDNA, ESTs or genomic) related to the nucleic acid sequence used in the methods of the present invention were identified amongst those maintained in the Entrez Nucleotides database at the National Center for Biotechnology Information (NCBI) using database sequence search tools, such as the Basic Local Alignment Tool (BLAST) (Altschul et al. (1990) J. Mol. Biol. 215:403-410; and Altschul et al. (1997) Nucleic Acids Res. 25:3389-3402). The program is used to find regions of local similarity between sequences by comparing nucleic acid or polypeptide sequences to sequence databases and by calculating the statistical significance of matches. For example, the polypeptide encoded by the nucleic acid used in the present invention was used for the TBLASTN algorithm, with default settings and the filter to ignore low complexity sequences set off. The output of the analysis was viewed by pairwise comparison, and ranked according to the probability score (E-value), where the score reflect the probability that a particular alignment occurs by chance (the lower the E-value, the more significant the hit). In addition to E-values, comparisons were also scored by percentage identity. Percentage identity refers to the number of identical nucleotides (or amino acids) between the two compared nucleic acid (or polypeptide) sequences over a particular length. In some instances, the default parameters may be adjusted to modify the stringency of the search. For example the E-value may be increased to show less stringent matches. This way, short nearly exact matches may be identified.

1.1. Leucoanthocyanidin Dioxygenase (LDOX) Polypeptides Table A1 provides a list of nucleic acid sequences related to the nucleic acid sequence used in the methods of the present invention. These sequences are part of subgroup A in the phylogenetic tree of FIG. 4.

TABLE A1
Examples of LDOX polypeptides:

| | Nucleic acid | Polypeptide |
|---|---|---|
| Name of gene | SEQ ID NO: | SEQ ID NO: |
| A.thaliana_AT5G05600.1#1_PLN_LDOX-1 | 1 | 2 |
| Gossypium_hirsutum_EU921264#1_PLN_LDOX-1 | 3 | 4 |
| Hieracium_pilosella_EU561015#1_PLN_LDOX-1 | 5 | 6 |
| A.thaliana_AT3G11180.1#1_PLN_LDOX-1 | 7 | 8 |
| P.trichocarpa_560919#1_PLN_LDOX-1 | 9 | 10 |
| P.trichocarpa_646527#1_PLN_LDOX-1 | 11 | 12 |
| G.max_TC240789#1_PLN_LDOX-1 | 13 | 14 |
| S.bicolor_Sb03g038880.1#1_PLN_LDOX-1 | 15 | 16 |
| A.thaliana_AT2G38240.1#1_PLN_LDOX-1 | 17 | 18 |
| A.thaliana_AT4G22880.1#1_PLN_LDOX-1 | 19 | 20 |
| O.sativa_LOC_Os11g25060.1#1_PLN_LDOX-1 | 21 | 22 |
| O.sativa_LOC_Os06g06720.1#1_PLN_LDOX-1 | 23 | 24 |
| Anthurium_andraeanum_AY232495#1_PLN_LDOX-1 | 25 | 26 |
| Allium_cepa_AY221248#1_PLN_LDOX-1 | 27 | 28 |
| O.sativa_LOC_Os02g52840.1#1_PLN_LDOX-1 | 29 | 30 |
| Antirrhinum_majus_DQ272591#1_PLN_LDOX-1 | 31 | 32 |
| A.thaliana_AT4G03070.1#1_PLN_LDOX-like | 33 | 34 |
| P.patens_220256#1_PLN_LDOX-like | 35 | 36 |
| M.truncatula_AC149079_25.4#1_PLN_LDOX-like | 37 | 38 |
| S.lycopersicum_TC206577#1_FUNGI_LDOX-like | 39 | 40 |
| A.fumigatus_XP_746433.2_Aspergillus_fumigatus_Af293_FUNGI_LDOX-like | 41 | 42 |
| P.stutzeri_YP_001173385.1_Pseudomonas_stutzeri_A1501_BAC_LDOX-like | 43 | 44 |
| B.phymatum_YP_001861244.1_Burkholderia_phymatum_STM815_BAC_LDOX-like | 45 | 46 |
| P.aeruginosa_YP_001345621.1_Pseudomonas_aeruginosa_PA7_BAC_LDOX-like | 47 | 48 |
| P.aeruginosa_NP_252880.1_Pseudomonas_aeruginosa_PAO1_BAC_LDOX-like | 49 | 50 |
| G.zeae_XP_391616.1_FG11440.1_Gibberella_zeae_PH-1_FUNGI_LDOX-like | 51 | 52 |
| M.smegmatis_YP_884827.1_Mycobacterium_smegmatis_str_MC2 155_BAC_LDOX-like | 53 | 54 |
| S.pombe_NP_588526.2_Schizosaccharomyces_pombe_972h_FUNGI_LDOX-like | 55 | 56 |
| O.sativa_LOC_Os02g41954.1#1_PLN_LDOX-like | 57 | 58 |
| P.patens_141764#1_PLN_LDOX-like | 59 | 60 |
| P.trichocarpa_760976#1_PLN_LDOX-like | 61 | 62 |
| Acacia_mangium_EU252106#1_PLN_LDOX-like | 63 | 64 |
| Helianthus_annuus_AM989990#1_PLN_LDOX-like | 65 | 66 |
| Phaseolus_vulgaris_U70532#1_PLN_LDOX-like | 67 | 68 |
| Gossypium_hirsutum_AY895169#1_PLN_LDOX-like | 69 | 70 |
| M.truncatula_AC152349_23.5#1_PLN_LDOX-like | 71 | 72 |
| A.thaliana_AT2G34555.1#1_PLN_LDOX-like | 73 | 74 |
| A.thaliana_AT1G78440.1#1_PLN_LDOX-like | 75 | 76 |
| Helianthus_annuus_FM872397#1_PLN_LDOX-like | 77 | 78 |
| Phaseolus_coccineus_AJ132438#1_PLN_LDOX-like | 79 | 80 |
| S.bicolor_Sb03g035000.1#1_PLN_LDOX-like | 81 | 82 |
| Zea_mays_EU951971#1_PLN_LDOX-like | 83 | 84 |
| M.truncatula_AC124961_21.4#1_PLN_LDOX-like | 85 | 86 |
| A.thaliana_AT4G21690.1#1_PLN_LDOX-like | 87 | 88 |
| Phaseolus_coccineus_AJ854305#1_PLN_LDOX-like | 89 | 90 |
| O.sativa_LOC_Os01g08220.1#1_PLN_LDOX-like | 91 | 92 |
| P.patens_127644#1_PLN_LDOX-like | 93 | 94 |
| A.thaliana_AT4G23340.1#1_PLN_LDOX-like | 95 | 96 |
| A.thaliana_AT1G78550.1#1_PLN_LDOX-like | 97 | 98 |
| Helianthus_annuus_EF469861#1_PLN_LDOX-like | 99 | 100 |
| S.lycopersicum_TC196004#1_PLN_LDOX-like | 101 | 102 |
| P.trichocarpa_550094#1_PLN_LDOX-like | 103 | 104 |
| O.sativa_LOC_Os10g40880.1#1_PLN_LDOX-like | 105 | 106 |
| T.aestivum_c54899629@17382#1_PLN_LDOX-like | 107 | 108 |
| Z.mays_ZM07MC20186_BFb0126L23@20135#1_PLN_LDOX-like | 109 | 110 |
| S.bicolor_Sb02g007240.1#1_PLN_LDOX-like | 111 | 112 |
| Zea_mays_EU972786#1_PLN_LDOX-like | 113 | 114 |
| P.trichocarpa_578863#1_PLN_LDOX-like | 115 | 116 |
| M.truncatula_TC119720#1_PLN_LDOX-like | 117 | 118 |
| G.max_TC252707#1_PLN_LDOX-like | 119 | 120 |
| S.bicolor_Sb10g005210.1#1_PLN_LDOX-like | 121 | 122 |
| A.thaliana_AT4G10500.1#1_PLN_Z | 123 | 124 |
| P.trichocarpa_569251#1_PLN_Z | 125 | 126 |
| M.truncatula_AC151423_10.5#1_PLN_Z | 127 | 128 |
| P.patens_162685#1_PLN_Z | 129 | 130 |
| O.sativa_LOC_Os08g37456.1#1_PLN_Z | 131 | 132 |
| G.max_TC263716#1_PLN_Z | 133 | 134 |
| S.lycopersicum_TC196957#1_PLN_Z | 135 | 136 |
| O.sativa_LOC_Os02g53180.1#1_PLN_Z | 137 | 138 |
| Actinidia_deliciosa_M97961#1_PLN_Z | 139 | 140 |
| Hevea_brasiliensis_AM743172#1_PLN_Z | 141 | 142 |
| Phaseolus_lunatus_AB062359#1_PLN_Z | 143 | 144 |
| Gossypium_hirsutum_DQ116444#1_PLN_Z | 145 | 146 |
| O.sativa_LOC_Os04g56700.1#1_PLN_Z | 147 | 148 |
| Aethusa_cynapium_DQ683351#1_PLN_Z | 149 | 150 |
| Ammi_majus_AY817678#1_PLN_Z | 151 | 152 |
| Anethum_graveolens_AY817679#1_PLN_Z | 153 | 154 |
| G.max_TC235255#1_PLN_Z | 155 | 156 |
| Aethusa_cynapium_DQ683350#1_PLN_Z | 157 | 158 |
| Apium_graveolens_AY817676#1_PLN_Z | 159 | 160 |
| Allium_cepa_AY221246#1_PLN_Z | 161 | 162 |
| Anthurium_andraeanum_AY232493#1_PLN_Z | 163 | 164 |
| Hieracium_pilosella_EU561014#1_PLN_Z | 165 | 166 |
| P.trichocarpa_773769#1_PLN_Z | 167 | 168 |
| S.lycopersicum_TC205689#1_PLN_Z | 169 | 170 |
| P.patens_146815#1_PLN_Z | 171 | 172 |

[0642] In some instances, related sequences have tentatively been assembled and publicly disclosed by research institutions, such as The Institute for Genomic Research (TIGR; beginning with TA). The Eukaryotic Gene Orthologs (EGO) database may be used to identify such related sequences, either by keyword search or by using the BLAST algorithm with the nucleic acid sequence or polypeptide sequence of interest. On other instances, special nucleic acid sequence databases have been created for particular organisms, such as by the Joint Genome Institute. Further, access to proprietary databases, has allowed the identification of novel nucleic acid and polypeptide sequences.

### 1.2. YRP5 Polypeptides

[0643] Table A2 provides a list of YRP5 nucleic acid sequences.

TABLE A2
Examples YRP5 polypeptides:

| | | Nucleic acid | Polypeptide |
|---|---|---|---|
| Name | Organism | SEQ ID NO | SEQ ID NO |
| Pt_YRP5 | Populus trichocarpa | 185 | 186 |
| At_YRP5 | Arabidopsis thaliana | 187 | 188 |

[0644] In some instances, related sequences are tentatively assembled and publicly disclosed by research institutions, such as The Institute for Genomic Research (TIGR; beginning with TA). The Eukaryotic Gene Orthologs (EGO) database is used to identify such related sequences, either by keyword search or by using the BLAST algorithm with the nucleic acid sequence or polypeptide sequence of interest. In other instances, special nucleic acid sequence databases are created for particular organisms, such as by the Joint Genome Institute.

### 1.3. Casein Kinase Type I (CK1) Polypeptides

[0645] Table A3 provides a list of homologous nucleic acid sequences related to the nucleic acid sequence used in the methods of the present invention.

TABLE A3
Examples of CK1 nucleic acids and their encoded polypeptides:

| | Nucleic Acid | Polynucleotide |
|---|---|---|
| Name | SEQ ID NO: | SEQ ID NO: |
| A.thaliana_AT5G43320.1 | 194 | 195 |
| A.thaliana_AT5G43320.1_AF360257 | 196 | 197 |
| A.thaliana_AT1G03930.1 | 198 | 199 |
| A.thaliana_AT1G04440.1 | 200 | 201 |
| A.thaliana_AT3G23340.1 | 202 | 203 |
| A.thaliana_AT4G14340.1 | 204 | 205 |
| A.thaliana_AT4G28540.1 | 206 | 207 |
| A.thaliana_AT5G44100.1 | 208 | 209 |
| B.napus_BN06MC08360_42724797@8337 | 210 | 211 |
| B.napus_BN06MC29527_51362554@29403 | 212 | 213 |
| C.sinensis_TA13558_2711 | 214 | 215 |
| G.max_Gm0063x00417 | 216 | 217 |
| G.max_Gm0272x00019 | 218 | 219 |
| G.max_GM06MC19561_59701261@19191 | 220 | 221 |
| H.argophyllus_TA2201_73275 | 222 | 223 |
| H.vulgare_TA34160_4513 | 224 | 225 |
| Lsativa_TA836_4236 | 226 | 227 |
| L.usitatissimum_LU04MC11322_LU61714150@11318 | 228 | 229 |
| M.domestica_TA29095_3750 | 230 | 231 |
| M.truncatula_AC174288_27.4 | 232 | 233 |
| O.sativa_LOC_Os02g40860.1 | 234 | 235 |
| O.sativa_LOC_Os02g56560.1 | 236 | 237 |
| O.sativa_LOC_Os04g43490.1 | 238 | 239 |
| O.sativa_LOC_Os10g33650.1 | 240 | 241 |
| P.trichocarpa_725863 | 242 | 243 |
| P.trichocarpa_803757 | 244 | 245 |
| P.trichocarpa_816074 | 246 | 247 |
| P.trichocarpa_scaff_V.1336 | 248 | 249 |
| P.trichocarpa_scaff_XIII.465 | 250 | 251 |
| S.bicolor_5277943 | 252 | 253 |
| S.bicolor_5284662 | 254 | 255 |
| S.officinarum_TA30972_4547 | 256 | 257 |
| T.aestivum_TA72195_4565 | 258 | 259 |
| V.vinifera_GSVIVT00020288001 | 260 | 261 |
| V.vinifera_GSVIVT00028561001 | 262 | 263 |
| Z.mays_TA179031_4577 | 264 | 265 |
| Z.mays_TA184008_4577 | 266 | 267 |
| Z.mays_ZM07MC21747_BFb0210E19@21687 | 268 | 269 |

[0646] In some instances, related sequences have tentatively been assembled and publicly disclosed by research institutions, such as The Institute for Genomic Research (TIGR; beginning with TA). The Eukaryotic Gene Orthologs (EGO) database may be used to identify such related sequences, either by keyword search or by using the BLAST algorithm with the nucleic acid sequence or polypeptide sequence of interest. On other instances, special nucleic acid sequence databases have been created for particular organisms, such as by the Joint Genome Institute. Further, access to proprietary databases, has allowed the identification of novel nucleic acid and polypeptide sequences.

1.4. Basic Helix Loop Helix Group 12 (bHLH12-like) Polypeptides

[0647] Table A4 provides a list of homologous nucleic acid sequences related to the nucleic acid sequence used in the methods of the present invention.

TABLE A4
Examples of bHLH12-like nucleic acids and their encoded polypeptides:

| | Nucleic acid | Polypeptide |
|---|---|---|
| Name | SEQ ID NO: | SEQ ID NO: |
| Poptr_TA1 | 279 | 280 |
| A.thaliana_AT1G68920.1 | 281 | 282 |
| A.thaliana_AT3G07340.1 | 283 | 284 |
| A.thaliana_AT5G48560.1 | 285 | 286 |
| AT1G26260.1 | 287 | 288 |
| G.max_Gm0017x00130 | 289 | 290 |
| G.max_Gm0119x00198 | 291 | 292 |
| M.truncatula_AC171266_17.4 | 293 | 294 |
| O.sativa.indica_BGIOSIBCE028578 | 295 | 296 |
| O.sativa.indica_BGIOSIBCE030471 | 297 | 298 |
| O.sativa_LOC_Os01g68700.1 | 299 | 300 |
| O.sativa_LOC_Os09g32510.1 | 301 | 302 |
| O.sativa_LOC_Os09g32510.2 | 303 | 304 |
| O.sativa_LOC_Os09g32510.3 | 305 | 306 |
| O.sativa_LOC_Os09g32510.4 | 307 | 308 |
| O.sativa_Os01g0915600 | 309 | 310 |
| O.sativa_Os08g0524800 | 311 | 312 |
| O.sativa_Os09g0501600 | 313 | 314 |
| O.sativa_TA48480_4530 | 315 | 316 |
| P.patens_171809 | 317 | 318 |
| P.persica_TA4550_3760 | 319 | 320 |
| P.trichocarpa_553223 | 321 | 322 |
| P.trichocarpa_566736 | 323 | 324 |
| P.trichocarpa_572918 | 325 | 326 |
| S.bicolor_5288233 | 327 | 328 |
| V.vinifera_GSVIVT00021166001 | 329 | 330 |
| V.vinifera_GSVIVT00031646001 | 331 | 332 |
| Z.mays_TA192877_4577 | 333 | 334 |
| Z.mays_ZM07MC34166_BFb0333O07@34064 | 335 | 336 |
| A.formosa_x_pubescens_TA11486_338618 | 337 | 338 |
| A.formosa_x_pubescens_TA14036_338618 | 339 | 340 |
| A.thaliana_AT3G23690.1 | 341 | 342 |
| AT1G10120.1 | 343 | 344 |
| AT1G18400.1 | 345 | 346 |
| AT1G25330.1 | 347 | 348 |
| AT1G59640.1 | 349 | 350 |
| AT1G73830.1 | 351 | 352 |
| AT1G74500.1 | 353 | 354 |
| AT2G18300.1 | 355 | 356 |
| AT2G42300.1 | 357 | 358 |
| AT3G47710.1 | 359 | 360 |
| AT3G57800.1 | 361 | 362 |
| AT4G34530.1 | 363 | 364 |
| AT5G15160.1 | 365 | 366 |
| AT5G39860.1 | 367 | 368 |
| AT5G50915.1 | 369 | 370 |
| AT5G62610.1 | 371 | 372 |
| Atrichopoda_CO999791 | 373 | 374 |
| G.max_Gm0048x00157 | 375 | 376 |
| G.max_Gm0248x00045.1 | 377 | 378 |
| M.truncatula_TA31225_3880 | 379 | 380 |
| O.sativa_LOC_Os09g32510.5 | 381 | 382 |
| P.sitchensis_TA17440_3332 | 383 | 384 |
| P.taeda_TA18081_3352 | 385 | 386 |
| S.bicolor_TA25015_4558 | 387 | 388 |
| S.moellendorffii_439190 | 389 | 390 |
| S.tuberosum_TA37331_4113 | 391 | 392 |
| Z.mays_TA159345_4577 | 393 | 394 |
| Os_BEE3 | 395 | 396 |
| At_BEE3 | 397 | 398 |
| At_BEE3_2 | 399 | 400 |
| Os_BEE3_2 | 401 | 402 |

[0648] In some instances, related sequences have tentatively been assembled and publicly disclosed by research institutions, such as The Institute for Genomic Research (TIGR; beginning with TA). The Eukaryotic Gene Orthologs (EGO) database may be used to identify such related sequences, either by keyword search or by using the BLAST algorithm with the nucleic acid sequence or polypeptide sequence of interest. On other instances, special nucleic acid sequence databases have been created for particular organisms, such as by the Joint Genome Institute. Further, access to proprietary databases, has allowed the identification of novel nucleic acid and polypeptide sequences.

### 1.5. Alcohol Dehydrogenase (ADH2) Polypeptides

[0649] Table A5 provides a list of nucleic acid sequences related to the nucleic acid sequence used in the methods of the present invention.

TABLE A5
Examples of ADH2 polypeptides:

| | Nucleic acid | Polypeptide |
|---|---|---|
| Name | SEQ ID NO: | SEQ ID NO: |
| Arabidopsis | 412 | 413 |
| T M C 37431;CDS ;278;1423;4547;39# | 414 | 415 |
| A.thaliana_AT5G43940.1#1 | 416 | 417 |
| M.truncatula_AC146819_11.4#1 | 418 | 419 |
| O.sativa_AK058376#1 | 420 | 421 |
| O.sativa_AK109105#1 | 422 | 423 |
| O.sativa_Os02g0815500#1 | 424 | 425 |
| P.patens_129804#1 | 426 | 427 |
| P.patens_137950#1 | 428 | 429 |
| P.trichocarpa_scaff_II.2595#1 | 430 | 431 |
| P.trichocarpa_scaff_XIV.1430# | 432 | 433 |
| S.lycopersicum_TC191692# | 434 | 435 |
| Sugarcane | 436 | 437 |
| Z.mays_TA10843_4577999# | 438 | 439 |
| T M C 884;CDS ;46;1185;3702;40# | 440 | 441 |

[0650] In some instances, related sequences have tentatively been assembled and publicly disclosed by research institutions, such as The Institute for Genomic Research (TIGR; beginning with TA). The Eukaryotic Gene Orthologs (EGO) database may be used to identify such related sequences, either by keyword search or by using the BLAST algorithm with the nucleic acid sequence or polypeptide sequence of interest. On other instances, special nucleic acid sequence databases have been created for particular organisms, such as by the Joint Genome Institute. Further, access to proprietary databases, has allowed the identification of novel nucleic acid and polypeptide sequences.

### 1.6. GCN5-Like Polypeptides

[0651] Table A6 provides a list of GCN5-like sequences.

TABLE A6
Examples of GCN5-like polypeptides:

| | Nucleic acid | Polypeptide |
|---|---|---|
| Name | SEQ ID NO: | SEQ ID NO: |
| >T.aestivum_GCN5 | 459 | 460 |
| >Hordeum_vulgare_AK252049 | 461 | 462 |
| >O.sativa_LOC_Os10g28040.1 | 463 | 464 |
| >S.bicolor_Sb01g021950.1 | 465 | 466 |
| >Zea_mays_AF440227 | 467 | 468 |
| >A.thaliana_AT3G54610.1 | 469 | 470 |
| >G.max_Glyma03g31490.1 | 471 | 472 |
| >G.max_Glyma19g34340.1 | 473 | 474 |
| >P.trichocarpa_421007 | 475 | 476 |
| >P.sitchensis_WS0277_C21 | 477 | 478 |
| >S.moellendorffii_139448 | 479 | 480 |
| >P.patens_HAG1501 | 481 | 482 |
| >C.reinhardtii_142398 | 483 | 484 |
| >C.vulgaris_43427 | 485 | 486 |
| >O.lucimarinus_33057 | 487 | 488 |
| >O.RCC809_28620 | 489 | 490 |
| >O.taurii_34304 | 491 | 492 |
| >S.cerevisiae_GCN5 | 493 | 494 |
| >D.discoidum_GCN5 | 495 | 496 |
| >H.sapiens_GCN5 | 497 | 498 |
| >P.tricornutum_HAG15203 | 499 | 500 |

[0652] In some instances, related sequences have tentatively been assembled and publicly disclosed by research institutions, such as The Institute for Genomic Research (TIGR; beginning with TA). The Eukaryotic Gene Orthologs (EGO) database may be used to identify such related sequences, either by keyword search or by using the BLAST algorithm with the nucleic acid sequence or polypeptide sequence of interest. On other instances, special nucleic acid sequence databases have been created for particular organisms, such as by the Joint Genome Institute. Further, access to proprietary databases, has allowed the identification of novel nucleic acid and polypeptide sequences.

### Example 2

### Alignment of Sequences Related to the Polypeptide Sequences Used in the Methods of the Invention

### 2.1. Leucoanthocyanidin Dioxygenase (LDOX) Polypeptides

[0653] Alignment of polypeptide sequences was performed using the ClustalW algorithm of progressive alignment (Thompson et al. (1997) Nucleic Acids Res 25:4876-4882; Chema et al. (2003). Nucleic Acids Res 31:3497-3500) with standard setting (slow alignment, similarity matrix: Blosum 62 (if polypeptides are aligned), gap opening penalty 10, gap extension penalty: 0.2). The LDOX polypeptides are aligned in FIG. 3.

[0654] This alignment can be used for determining conserved signature sequences of about 5 to 10 amino acids in length. Preferably the conserved regions of the proteins are used, recognisable by the identical residues across the alignment, and conserved substitutions. Persons skilled in the art are familiar with identifying such conserved regions.

[0655] For the phylogenetic tree, the proteins were aligned using MAFT (Katoh and Toh (2008). Briefings in Bioinformatics 9:286-298.). A neighbour-joining tree was calculated using QuickTree1.1 (Houwe et al. (2002). Bioinformatics 18(11):1546-7). A circular dendrogram was drawn using Dendroscope2.0.1 (Hudson et al. (2007). Bioinformatics 8(1):460). The tree was generated using representative members of each cluster. Four subgroups can be recognised within the LDOX proteins, yet they have the same functional activity. SEQ ID NO: 2 is indicated as A.thalianaAT5G05600.1#1_PLN in the tree.

### 2.2. YRP5 Polypeptides

[0656] Alignment of polypeptide sequences is performed using the ClustalW 2.0 algorithm of progressive alignment (Thompson et al. (1997) Nucleic Acids Res 25:4876-4882; Chema et al. (2003). Nucleic Acids Res 31:3497-3500) with standard setting (slow alignment, similarity matrix: Gonnet (or Blosum 62 (if polypeptides are aligned), gap opening penalty 10, gap extension penalty: 0.2). Minor manual editing is done to further optimise the alignment.

[0657] A phylogenetic tree of YRP5 polypeptides is constructed using a neighbour-joining clustering algorithm as provided in the AlignX programme from the Vector NTI (Invitrogen).

[0658] Alignment of polypeptide sequences is performed using the ClustalW 2.0 algorithm of progressive alignment (Thompson et al. (1997) Nucleic Acids Res 25:4876-4882; Chema et al. (2003). Nucleic Acids Res 31:3497-3500) with standard setting (slow alignment, similarity matrix: Gonnet, gap opening penalty 10, gap extension penalty: 0.2). Minor manual editing is done to further optimise the alignment.

### 2.3. Casein Kinase Type I (CK1) Polypeptides

[0659] Alignment of polypeptide sequences was performed using the MAFFT alignment program (MAFFT (v6.704b)), a method for rapid multiple sequence alignment based on fast Fourier transform in which an amino acid sequence is converted to a sequence composed of volume and polarity values of each amino acid residue, essentially as described by Katoh et al. Nucleic Acids Research, 2002, Vol. 30, No. 14 3059-3066.

[0660] The CK1 polypeptides are aligned and shown in a CLUSTAL format alignment in FIG. 7.

[0661] Highly conserved residues (*) and conservative residues (:) and are indicated.

2.4. Basic Helix Loop Helix Group 12 (bHLH12-Like) Polypeptides

[0662] Alignment of polypeptide sequences was performed using the Align package of the VNTI programme (Invitrogen), using default parameters.

[0663] The bHLH12-like polypeptides are aligned and shown in a CLUSTAL format alignment in FIG. 9. A consensus sequence showing the most highly abundant amino acids is shown. No amino acid in the consensus indicates that any amino acid or no amino acid is allowed at that position.

### 2.5. Alcohol Dehydrogenase (ADH2) Polypeptides

[0664] Alignment of polypeptide sequences is performed using the ClustalW 2.0 algorithm of progressive alignment (Thompson et al. (1997) Nucleic Acids Res 25:4876-4882; Chema et al. (2003). Nucleic Acids Res 31:3497-3500) with standard setting (slow alignment, similarity matrix: Gonnet (or Blosum 62 (if polypeptides are aligned), gap opening penalty 10, gap extension penalty: 0.2). Minor manual editing is done to further optimise the alignment. A phylogenetic tree of ADH2 polypeptides is constructed using a neighbour-joining clustering algorithm as provided in the AlignX programme from the Vector NTI (Invitrogen).

### 2.6. GCN5-Like Polypeptides

[0665] Alignment of polypeptide sequences was performed using the ClustalW 2.0 algorithm of progressive alignment (Thompson et al. (1997) Nucleic Acids Res 25:4876-4882; Chema et al. (2003). Nucleic Acids Res 31:3497-3500) with standard setting (slow alignment, similarity matrix: Gonnet (or Blosum 62 (if polypeptides are aligned), gap opening penalty 10, gap extension penalty: 0.2).

[0666] A phylogenetic tree of GCN5-like polypeptide (FIG. 15) was constructed using a neighbour-joining clustering algorithm as provided in the AlignX programme from the Vector NTI (Invitrogen).

### Example 3

### Calculation of Global Percentage Identity Between Polypeptide Sequences Useful in Performing the Methods of the Invention

### 3.1. Leucoanthocyanidin Dioxygenase (LDOX) Polypeptides

[0667] Global percentages of similarity and identity between full length polypeptide sequences useful in performing the methods of the invention were determined using one of the methods available in the art, the MatGAT (Matrix Global Alignment Tool) software (BMC Bioinformatics. 2003 4:29. MatGAT: an application that generates similarity/identity matrices using protein or DNA sequences. Campanella J J, Bitincka L, Smalley J; software hosted by Ledion Bitincka). MatGAT software generates similarity/identity matrices for DNA or protein sequences without needing pre-alignment of the data. The program performs a series of pair-wise alignments using the Myers and Miller global alignment algorithm (with a gap opening penalty of 12, and a gap extension penalty of 2), calculates similarity and identity using for example Blosum 62 (for polypeptides), and then places the results in a distance matrix.

[0668] Parameters used in the comparison were:
[0669] Scoring matrix: Blosum62
[0670] First Gap: 12
[0671] Extending gap: 2

[0672] Results of the software analysis are shown in Table B1 for the global identity over the full length of the polypeptide sequences.

[0673] The percentage identity between the LDOX polypeptide sequences useful in performing the methods of the invention can be as low as 18.2% amino acid identity compared to SEQ ID NO: 2; even within the subgroup A of the phylogenetic tree comprising SEQ ID NO: 2 the sequence identity can be as low as 26.7%.

TABLE B1
MatGAT results for global similarity and identity over the full length of the polypeptide sequences.

| | 1 | 2 | 3 | 4 | 5 | 6 | 7 | 8 | 9 | 10 | 11 | 12 | 13 |
|---|---|---|---|---|---|---|---|---|---|---|---|---|---|
| 1. G.hirsutum_EU921264 | | 71.3 | 32.8 | 36.2 | 83.4 | 38 | 33.9 | 35.1 | 76 | 35.8 | 28.6 | 29.6 | 65.3 |
| 2. H.pilosella_EU561015 | | | 32.8 | 34.9 | 71.7 | 37.5 | 32.1 | 34.3 | 70.9 | 34.5 | 28.6 | 30.7 | 59.8 |
| 3. A.thaliana_AT3G11180 | | | | 54.1 | 31.8 | 28.4 | 50.1 | 49.6 | 31.1 | 72 | 42.1 | 32.1 | 31.5 |
| 4. P.trichocarpa_560919 | | | | | 36.5 | 34.7 | 53.2 | 58.3 | 37.4 | 59.1 | 44.2 | 33.3 | 33.4 |
| 5. P.trichocarpa_646527 | | | | | | 38.4 | 34.9 | 35.1 | 76.5 | 35.2 | 29.9 | 32.9 | 67.7 |
| 6. G.max_TC240789 | | | | | | | 31.5 | 33.7 | 38.9 | 30.7 | 27 | 30.7 | 36.5 |
| 7. S.bicolor_Sb03g038880 | | | | | | | | 51.2 | 32.7 | 54.5 | 44.6 | 37.3 | 37 |
| 8. A.thaliana_AT2G38240 | | | | | | | | | 35 | 53.7 | 46.3 | 38 | 34.1 |
| 9. A.thaliana_AT4G22880 | | | | | | | | | | 33.4 | 29.1 | 31 | 63.3 |
| 10. A.thaliana_AT5G05600 | | | | | | | | | | | 44.9 | 35.8 | 33.3 |
| 11. O.sativa_LOC_Os11g25060 | | | | | | | | | | | | 34.5 | 30.2 |
| 12. O.sativa_LOC_Os06g06720 | | | | | | | | | | | | | 31.2 |
| 13. A.andraeanum_AY232495 | | | | | | | | | | | | | |
| 14. A.cepa_AY221248 | | | | | | | | | | | | | |
| 15. O.sativa_LOC_Os02g52840.1 | | | | | | | | | | | | | |
| 16. A.majus_DQ272591 | | | | | | | | | | | | | |
| 17. A.thaliana_AT4G03070 | | | | | | | | | | | | | |
| 18. P.patens_220256 | | | | | | | | | | | | | |
| 19. M.truncatula_AC149079_25.4 | | | | | | | | | | | | | |
| 20. S.lycopersicum_TC206577 | | | | | | | | | | | | | |
| 21. A.fumigatus_XP_746433.2 | | | | | | | | | | | | | |
| 22. P.stutzeri_YP_001173385.1 | | | | | | | | | | | | | |
| 23. B.phymatum_YP_001861244.1 | | | | | | | | | | | | | |
| 24. P.aerogunosa_YP_001345621.1 | | | | | | | | | | | | | |
| 25. P.aeruginosa_NP_252880.1 | | | | | | | | | | | | | |
| 26. G.zeae_XP_391616.1_FG11440.1 | | | | | | | | | | | | | |
| 27. M.smegmatis_YP_884827.1 | | | | | | | | | | | | | |
| 28. S.pombe_NP_588526.2 | | | | | | | | | | | | | |
| 29. O.sativa_LOC_Os02g41954.1 | | | | | | | | | | | | | |
| 30. P.patens_141764 | | | | | | | | | | | | | |
| 31. P.trichocarpa_760976 | | | | | | | | | | | | | |
| 32. A.mangium_EU252106 | | | | | | | | | | | | | |
| 33. H.annuus_AM989990 | | | | | | | | | | | | | |
| 34. P.vulgaris_U70532 | | | | | | | | | | | | | |
| 35. G.hirsutum_AY895169 | | | | | | | | | | | | | |
| 36. M.truncatula_AC152349_23.5 | | | | | | | | | | | | | |
| 37. A.thaliana_AT2G34555.1 | | | | | | | | | | | | | |
| 38. A.thaliana_AT1G78440.1 | | | | | | | | | | | | | |
| 39. H.annuus_FM872397 | | | | | | | | | | | | | |
| 40. Pcoccineus_AJ132438 | | | | | | | | | | | | | |
| 41. S.bicolor_Sb03g035000.1 | | | | | | | | | | | | | |
| 42. Zea_mays_EU951971 | | | | | | | | | | | | | |
| 43. M.truncatula_AC124961_21.4 | | | | | | | | | | | | | |
| 44. A.thaliana_AT4G21690.1 | | | | | | | | | | | | | |
| 45. P.coccineus_AJ854305 | | | | | | | | | | | | | |
| 46. O.sativa_LOC_Os01g08220.1 | | | | | | | | | | | | | |
| 47. P.patens_127644 | | | | | | | | | | | | | |
| 48. A.thaliana_AT4G23340.1 | | | | | | | | | | | | | |
| 49. A.thaliana_AT1G78550.1 | | | | | | | | | | | | | |
| 50. H.annuus_EF469861 | | | | | | | | | | | | | |
| 51. S.lycopersicum_TC196004 | | | | | | | | | | | | | |
| 52. P.trichocarpa_550094 | | | | | | | | | | | | | |
| 53. O.sativa_LOC_Os10g40880.1 | | | | | | | | | | | | | |
| 54. T.aestivum_c54899629@17382 | | | | | | | | | | | | | |
| 55. Z.mays_ZM07MC20186_BFb0126L23 | | | | | | | | | | | | | |
| 56. S.bicolor_Sb02g007240.1 | | | | | | | | | | | | | |
| 57. Zea_mays_EU972786 | | | | | | | | | | | | | |
| 58. P.trichocarpa_578863 | | | | | | | | | | | | | |
| 59. M.truncatula_TC119720 | | | | | | | | | | | | | |
| 60. G.max_TC252707 | | | | | | | | | | | | | |
| 61. S.bicolor_Sb10g005210.1 | | | | | | | | | | | | | |

| | 14 | 15 | 16 | 17 | 18 | 19 | 20 | 21 | 22 | 23 | 24 | 25 |
|---|---|---|---|---|---|---|---|---|---|---|---|---|
| 1. G.hirsutum_EU921264 | 61.9 | 38.1 | 37.9 | 20.4 | 25.7 | 24.3 | 23.3 | 21.7 | 24.5 | 21.7 | 23.1 | 19.7 |
| 2. H.pilosella_EU561015 | 58.7 | 38.6 | 40.3 | 21.3 | 24.2 | 23.5 | 24.1 | 21.4 | 23.1 | 20.7 | 21.5 | 21.4 |
| 3. A.thaliana_AT3G11180 | 34.3 | 31.9 | 30.2 | 20.6 | 25.5 | 24 | 23.8 | 22.3 | 25.8 | 25.2 | 22.1 | 23.3 |
| 4. P.trichocarpa_560919 | 34.8 | 36.1 | 35.6 | 22.8 | 27.4 | 25.5 | 25.5 | 25.1 | 27.2 | 26.2 | 24.7 | 25.7 |
| 5. P.trichocarpa_646527 | 60.9 | 37.4 | 37.9 | 21.5 | 24 | 24.1 | 23.6 | 21.8 | 23.2 | 20.6 | 22.3 | 20.5 |
| 6. G.max_TC240789 | 37.1 | 56.3 | 69.6 | 22.4 | 23.4 | 21.4 | 22.7 | 22.5 | 21.4 | 20.4 | 22.8 | 22.7 |
| 7. S.bicolor_Sb03g038880 | 35.3 | 35.4 | 32 | 21.5 | 24.6 | 23.4 | 25.3 | 24.6 | 26.5 | 24.9 | 25.4 | 24.1 |
| 8. A.thaliana_AT2G38240 | 36.5 | 39.4 | 36.7 | 22.9 | 25.8 | 26.1 | 23.1 | 24.9 | 25.7 | 26.5 | 25.1 | 25.7 |
| 9. A.thaliana_AT4G22880 | 60.7 | 39 | 38.5 | 21.9 | 27.3 | 24.7 | 23.5 | 20.5 | 23.7 | 21.1 | 23.5 | 22 |
| 10. A.thaliana_AT5G05600 | 34 | 35 | 32.8 | 22.3 | 26 | 27.1 | 26 | 25.2 | 27.1 | 28.2 | 24.6 | 24.3 |
| 11. O.sativa_LOC_Os11g25060 | 26.7 | 31.5 | 30.4 | 20.2 | 20.6 | 22.8 | 21.9 | 23.1 | 26.2 | 23.9 | 22.2 | 24.3 |
| 12. O.sativa_LOC_Os06g06720 | 31.6 | 35.3 | 31.1 | 23.5 | 24.5 | 22 | 22.9 | 22.9 | 23.1 | 26.7 | 24 | 26.2 |
| 13. A.andraeanum_AY232495 | 61.3 | 40.5 | 36.4 | 21.5 | 23.2 | 21.4 | 21.5 | 22.1 | 25.2 | 22.5 | 22.2 | 22.7 |
| 14. A.cepa_AY221248 | | 38.6 | 37.7 | 22.6 | 26.1 | 23 | 24.2 | 22.4 | 26.1 | 21.5 | 23 | 20.8 |
| 15. O.sativa_LOC_Os02g52840.1 | | | 55.8 | 21.2 | 26.6 | 21.9 | 22 | 21.9 | 28.1 | 24.1 | 25 | 25.3 |
| 16. A.majus_DQ272591 | | | | 21.3 | 23.6 | 21.1 | 23.2 | 22.4 | 23 | 21.6 | 21.6 | 22.9 |
| 17. A.thaliana_AT4G03070 | | | | | 22.7 | 20.8 | 23.5 | 20.5 | 21.5 | 22.4 | 22.5 | 22.3 |
| 18. P.patens_220256 | | | | | | 26.1 | 31.3 | 26.3 | 34.8 | 29.3 | 34 | 37.9 |
| 19. M.truncatula_AC149079_25.4 | | | | | | | 46.1 | 28 | 35.3 | 31.3 | 29.8 | 29.5 |
| 20. S.lycopersicum_TC206577 | | | | | | | | 31.5 | 36.3 | 31 | 37 | 32 |
| 21. A.fumigatus_XP_746433.2 | | | | | | | | | 38 | 28.4 | 34.4 | 31.2 |
| 22. P.stutzeri_YP_001173385.1 | | | | | | | | | | 36.2 | 39.6 | 40.8 |
| 23. B.phymatum_YP_001861244.1 | | | | | | | | | | | 39.5 | 37.4 |
| 24. P.aerogunosa_YP_001345621.1 | | | | | | | | | | | | 39.5 |
| 25. P.aeruginosa_NP_252880.1 | | | | | | | | | | | | |
| 26. G.zeae_XP_391616.1_FG11440.1 | | | | | | | | | | | | |
| 27. M.smegmatis_YP_884827.1 | | | | | | | | | | | | |
| 28. S.pombe_NP_588526.2 | | | | | | | | | | | | |
| 29. O.sativa_LOC_Os02g41954.1 | | | | | | | | | | | | |
| 30. P.patens_141764 | | | | | | | | | | | | |
| 31. P.trichocarpa_760976 | | | | | | | | | | | | |
| 32. A.mangium_EU252106 | | | | | | | | | | | | |
| 33. H.annuus_AM989990 | | | | | | | | | | | | |
| 34. P.vulgaris_U70532 | | | | | | | | | | | | |
| 35. G.hirsutum_AY895169 | | | | | | | | | | | | |
| 36. M.truncatula_AC152349_23.5 | | | | | | | | | | | | |
| 37. A.thaliana_AT2G34555.1 | | | | | | | | | | | | |
| 38. A.thaliana_AT1G78440.1 | | | | | | | | | | | | |
| 39. H.annuus_FM872397 | | | | | | | | | | | | |
| 40. Pcoccineus_AJ132438 | | | | | | | | | | | | |
| 41. S.bicolor_Sb03g035000.1 | | | | | | | | | | | | |
| 42. Zea_mays_EU951971 | | | | | | | | | | | | |
| 43. M.truncatula_AC124961_21.4 | | | | | | | | | | | | |
| 44. A.thaliana_AT4G21690.1 | | | | | | | | | | | | |
| 45. P.coccineus_AJ854305 | | | | | | | | | | | | |
| 46. O.sativa_LOC_Os01g08220.1 | | | | | | | | | | | | |
| 47. P.patens_127644 | | | | | | | | | | | | |
| 48. A.thaliana_AT4G23340.1 | | | | | | | | | | | | |
| 49. A.thaliana_AT1G78550.1 | | | | | | | | | | | | |
| 50. H.annuus_EF469861 | | | | | | | | | | | | |
| 51. S.lycopersicum_TC196004 | | | | | | | | | | | | |
| 52. P.trichocarpa_550094 | | | | | | | | | | | | |
| 53. O.sativa_LOC_Os10g40880.1 | | | | | | | | | | | | |
| 54. T.aestivum_c54899629@17382 | | | | | | | | | | | | |
| 55. Z.mays_ZM07MC20186_BFb0126L23 | | | | | | | | | | | | |
| 56. S.bicolor_Sb02g007240.1 | | | | | | | | | | | | |
| 57. Zea_mays_EU972786 | | | | | | | | | | | | |
| 58. P.trichocarpa_578863 | | | | | | | | | | | | |
| 59. M.truncatula_TC119720 | | | | | | | | | | | | |
| 60. G.max_TC252707 | | | | | | | | | | | | |
| 61. S.bicolor_Sb10g005210.1 | | | | | | | | | | | | |
| | 26 | 27 | 28 | 29 | 30 | 31 | 32 | 33 | 34 | 35 | 36 | 37 |
| 1. G.hirsutum_EU921264 | 21.4 | 22.9 | 21.8 | 26.8 | 25.3 | 24 | 26.3 | 26 | 28 | 25.5 | 22.5 | 25.3 |
| 2. H.pilosella_EU561015 | 23.5 | 23.7 | 21.3 | 24.3 | 23.8 | 23.5 | 25.7 | 26 | 26.9 | 25.8 | 21.4 | 25.2 |
| 3. A.thaliana_AT3G11180 | 21.2 | 25 | 19.5 | 28.1 | 26.5 | 27.9 | 29.1 | 28.9 | 27.3 | 29 | 25 | 25.4 |
| 4. P.trichocarpa_560919 | 25.7 | 26.4 | 21.2 | 30.9 | 30 | 27.9 | 30 | 29.2 | 26.9 | 28.5 | 25.6 | 28.7 |
| 5. P.trichocarpa_646527 | 24 | 23 | 21.4 | 23.3 | 26.6 | 23.8 | 26.7 | 27.6 | 26.5 | 25.5 | 23 | 22.9 |
| 6. G.max_TC240789 | 23.7 | 25.3 | 20.9 | 25.3 | 27.3 | 26.2 | 26 | 28.6 | 24.9 | 27.2 | 23.4 | 25.6 |
| 7. S.bicolor_Sb03g038880 | 22.5 | 29.9 | 18.6 | 32.9 | 29.9 | 27.5 | 30.4 | 31.2 | 30.3 | 30.8 | 27 | 28.6 |
| 8. A.thaliana_AT2G38240 | 24.1 | 25.8 | 21.4 | 31.5 | 28 | 26.6 | 27.9 | 28.6 | 28.8 | 27.8 | 27 | 27.6 |
| 9. A.thaliana_AT4G22880 | 23.1 | 21 | 20.3 | 22.3 | 24.5 | 26.2 | 26 | 25.3 | 30.1 | 26.6 | 23.7 | 25.1 |
| 10. A.thaliana_AT5G05600 | 24.6 | 27.4 | 22.6 | 31.4 | 28.6 | 30.6 | 32.1 | 31.4 | 31.3 | 32.2 | 26.2 | 26.6 |
| 11. O.sativa_LOC_Os11g25060 | 23.2 | 25.7 | 18.7 | 28.1 | 26.3 | 24.4 | 28.7 | 26.2 | 26.3 | 29.2 | 24 | 25 |
| 12. O.sativa_LOC_Os06g06720 | 24.9 | 24.5 | 21.5 | 28.9 | 28.9 | 24.3 | 23.8 | 25.4 | 25.5 | 26.5 | 23.2 | 26.4 |
| 13. A.andraeanum_AY232495 | 22.7 | 24.8 | 18.7 | 25.5 | 23.6 | 25.4 | 25.7 | 25.6 | 27.2 | 24.6 | 22.2 | 22.6 |
| 14. A.cepa_AY221248 | 23.5 | 23.3 | 18.8 | 27.5 | 27.1 | 23.8 | 25.8 | 25.8 | 27.5 | 26.3 | 21.2 | 25.5 |
| 15. O.sativa_LOC_Os02g52840.1 | 27.1 | 26 | 20 | 30.7 | 28.7 | 28.7 | 26.6 | 27.2 | 28.3 | 28.8 | 26.1 | 27.8 |
| 16. A.majus_DQ272591 | 26 | 22.5 | 20.8 | 26.8 | 27.8 | 27 | 28.4 | 28.9 | 27.7 | 28.4 | 23.4 | 26.2 |
| 17. A.thaliana_AT4G03070 | 21.4 | 19.8 | 22.9 | 20.9 | 25.4 | 25.6 | 25.1 | 24.7 | 23 | 21.1 | 22.1 | 24 |
| 18. P.patens_220256 | 26.5 | 32.5 | 23.4 | 23.8 | 28.9 | 26.9 | 24 | 22.3 | 26.5 | 24 | 23.9 | 24.7 |
| 19. M.truncatula_AC149079_25.4 | 25.7 | 27.2 | 29.6 | 23.9 | 23.1 | 25.6 | 21.2 | 21.1 | 22.8 | 22.8 | 21.1 | 21.7 |
| 20. S.lycopersicum_TC206577 | 27.2 | 30.8 | 28.6 | 24.4 | 26.2 | 24.1 | 21.9 | 22.5 | 23.7 | 22.8 | 21.1 | 23.9 |
| 21. A.fumigatus_XP_746433.2 | 26.8 | 29.2 | 24.3 | 24.4 | 23.1 | 26.6 | 23.9 | 21.9 | 23.1 | 23.4 | 22.7 | 21.8 |
| 22. P.stutzeri_YP_001173385.1 | 27.6 | 30.5 | 23.6 | 27.5 | 27.9 | 26.8 | 24.2 | 23.6 | 24.3 | 24.4 | 25.8 | 25.2 |
| 23. B.phymatum_YP_001861244.1 | 28.6 | 30.6 | 29.2 | 26.4 | 27 | 26.3 | 21.9 | 22.1 | 22.8 | 24.3 | 22.6 | 25.9 |
| 24. P.aerogunosa_YP_001345621.1 | 31.7 | 29.3 | 29.8 | 25.5 | 29 | 23.1 | 22 | 21.9 | 22.7 | 22 | 23.9 | 24.4 |
| 25. P.aeruginosa_NP_252880.1 | 26.3 | 31.9 | 24.4 | 25.6 | 26.3 | 25.6 | 23.4 | 22.7 | 24 | 25.8 | 23.3 | 28.6 |
| 26. G.zeae_XP_391616.1_FG11440.1 | | 25.7 | 20.9 | 26.7 | 23 | 28 | 24.7 | 25.6 | 25.1 | 23.4 | 24.4 | 27 |
| 27. M.smegmatis_YP_884827.1 | | | 25.8 | 24.7 | 24.6 | 23.5 | 19.9 | 20.1 | 19.6 | 21.2 | 21.2 | 22.8 |
| 28. S.pombe_NP_588526.2 | | | | 18.7 | 21.9 | 19.5 | 19.6 | 21 | 22.9 | 20.7 | 19.6 | 21.8 |
| 29. O.sativa_LOC_Os02g41954.1 | | | | | 28.4 | 27.3 | 26.5 | 27.2 | 26.8 | 27.7 | 26.9 | 25.9 |
| 30. P.patens_141764 | | | | | | 30.9 | 28.6 | 28.3 | 26.3 | 28.7 | 27.8 | 26.1 |
| 31. P.trichocarpa_760976 | | | | | | | 49.2 | 50.5 | 44.5 | 46.4 | 45.1 | 27.2 |
| 32. A.mangium_EU252106 | | | | | | | | 70.9 | 59.3 | 58.5 | 44.1 | 22.9 |
| 33. H.annuus_AM989990 | | | | | | | | | 58.4 | 60.8 | 45.9 | 24.4 |
| 34. P.vulgaris_U70532 | | | | | | | | | | 57.7 | 41.5 | 25.3 |
| 35. G.hirsutum_AY895169 | | | | | | | | | | | 42.5 | 27 |
| 36. M.truncatula_AC152349_23.5 | | | | | | | | | | | | 23.2 |
| 37. A.thaliana_AT2G34555.1 | | | | | | | | | | | | |
| 38. A.thaliana_AT1G78440.1 | | | | | | | | | | | | |
| 39. H.annuus_FM872397 | | | | | | | | | | | | |
| 40. Pcoccineus_AJ132438 | | | | | | | | | | | | |
| 41. S.bicolor_Sb03g035000.1 | | | | | | | | | | | | |
| 42. Zea_mays_EU951971 | | | | | | | | | | | | |
| 43. M.truncatula_AC124961_21.4 | | | | | | | | | | | | |
| 44. A.thaliana_AT4G21690.1 | | | | | | | | | | | | |
| 45. P.coccineus_AJ854305 | | | | | | | | | | | | |
| 46. O.sativa_LOC_Os01g08220.1 | | | | | | | | | | | | |
| 47. P.patens_127644 | | | | | | | | | | | | |
| 48. A.thaliana_AT4G23340.1 | | | | | | | | | | | | |
| 49. A.thaliana_AT1G78550.1 | | | | | | | | | | | | |
| 50. H.annuus_EF469861 | | | | | | | | | | | | |
| 51. S.lycopersicum_TC196004 | | | | | | | | | | | | |
| 52. P.trichocarpa_550094 | | | | | | | | | | | | |
| 53. O.sativa_LOC_Os10g40880.1 | | | | | | | | | | | | |
| 54. T.aestivum_c54899629@17382 | | | | | | | | | | | | |
| 55. Z.mays_ZM07MC20186_BFb0126L23 | | | | | | | | | | | | |
| 56. S.bicolor_Sb02g007240.1 | | | | | | | | | | | | |
| 57. Zea_mays_EU972786 | | | | | | | | | | | | |
| 58. P.trichocarpa_578863 | | | | | | | | | | | | |
| 59. M.truncatula_TC119720 | | | | | | | | | | | | |
| 60. G.max_TC252707 | | | | | | | | | | | | |
| 61. S.bicolor_Sb10g005210.1 | | | | | | | | | | | | |
| | 38 | 39 | 40 | 41 | 42 | 43 | 44 | 45 | 46 | 47 | 48 | 49 |
| 1. G.hirsutum_EU921264 | 24.1 | 23.8 | 22.5 | 24.9 | 22.8 | 27.2 | 27.4 | 25.3 | 28.1 | 24.4 | 23.3 | 28.7 |
| 2. H.pilosella_EU561015 | 23.3 | 23.2 | 22.4 | 25.8 | 24.3 | 23.6 | 26.8 | 25.6 | 27.1 | 23.8 | 22.5 | 28.7 |
| 3. A.thaliana_AT3G11180 | 24 | 22.2 | 23 | 25.7 | 23.7 | 23.1 | 25.3 | 26 | 24.8 | 23.8 | 25.9 | 30.3 |
| 4. P.trichocarpa_560919 | 27.4 | 25.9 | 25.7 | 28.9 | 25.5 | 25.6 | 27.9 | 26 | 27.1 | 25.1 | 23.7 | 32.4 |
| 5. P.trichocarpa_646527 | 24.1 | 23.6 | 21.8 | 24.2 | 23.1 | 27 | 26.2 | 25.2 | 27.2 | 25.1 | 21.8 | 29.8 |
| 6. G.max_TC240789 | 27.3 | 25.3 | 26.5 | 28.6 | 26.5 | 25.4 | 27.4 | 25.9 | 24.4 | 22.8 | 23.7 | 31.7 |
| 7. S.bicolor_Sb03g038880 | 24.7 | 26.2 | 27.2 | 29 | 28.4 | 26.2 | 24.9 | 26 | 29 | 25.1 | 22.8 | 30.6 |
| 8. A.thaliana_AT2G38240 | 27.2 | 25.7 | 27.3 | 30.2 | 27.7 | 27.4 | 30.9 | 28.5 | 29.1 | 27.2 | 24.9 | 34.3 |
| 9. A.thaliana_AT4G22880 | 23.9 | 22.8 | 22.9 | 22.7 | 24.7 | 24.9 | 25.7 | 25.6 | 27.9 | 26.7 | 20.8 | 29.8 |
| 10. A.thaliana_AT5G05600 | 24.7 | 24.7 | 24.5 | 26.6 | 25 | 26.9 | 26 | 26.1 | 27.3 | 24.9 | 26.3 | 30.8 |
| 11. O.sativa_LOC_Os11g25060 | 23.6 | 22.8 | 24.3 | 25.9 | 26 | 24.1 | 22.1 | 23.9 | 27.2 | 21.6 | 21.9 | 29.3 |
| 12. O.sativa_LOC_Os06g06720 | 23.5 | 25.3 | 24 | 27.7 | 28.6 | 23.7 | 27.2 | 26.5 | 28.4 | 22.8 | 23.4 | 30.5 |
| 13. A.andraeanum_AY232495 | 22.9 | 22.8 | 22.3 | 25.9 | 27.6 | 22.8 | 25.7 | 26 | 28.2 | 24.5 | 21.6 | 26.8 |
| 14. A.cepa_AY221248 | 24.7 | 23.5 | 24.3 | 26.3 | 25.9 | 25.8 | 28 | 24.2 | 28 | 24.5 | 23.4 | 28.5 |
| 15. O.sativa_LOC_Os02g52840.1 | 25.8 | 24.4 | 26.1 | 30 | 26.8 | 23.9 | 26.4 | 30.2 | 30.1 | 24.7 | 25.3 | 29.3 |
| 16. A.majus_DQ272591 | 29.5 | 25.5 | 23.9 | 28.1 | 25.3 | 25.9 | 25.8 | 28.1 | 24.6 | 25.4 | 25.3 | 30.9 |
| 17. A.thaliana_AT4G03070 | 25.1 | 24.2 | 23.5 | 22.7 | 22 | 24.3 | 22.8 | 21.1 | 20.9 | 19.9 | 26.9 | 22.6 |
| 18. P.patens_220256 | 26 | 25 | 24.2 | 25.5 | 24.9 | 26.3 | 21.2 | 24.8 | 23.7 | 23.3 | 22.8 | 23.5 |
| 19. M.truncatula_AC149079_25.4 | 22.2 | 21.6 | 20.1 | 22.7 | 21.4 | 23.4 | 22.3 | 25.1 | 22.3 | 23.3 | 25.7 | 25.9 |
| 20. S.lycopersicum_TC206577 | 26.5 | 24.6 | 24.4 | 23.9 | 24.6 | 24.5 | 23.8 | 24.7 | 23.7 | 24.6 | 26.8 | 25 |
| 21. A.fumigatus_XP_746433.2 | 23.6 | 23.8 | 24.2 | 24.2 | 25.9 | 21.3 | 22.8 | 24.8 | 23.5 | 22.1 | 24.1 | 20.8 |
| 22. P.stutzeri_YP_001173385.1 | 24.9 | 22.2 | 23.9 | 27.5 | 28.2 | 22.3 | 24.9 | 25.3 | 26.1 | 23 | 23.1 | 20.8 |
| 23. B.phymatum_YP_001861244.1 | 24.4 | 23.9 | 25.2 | 26.6 | 27.9 | 22.3 | 22.1 | 22.3 | 25.3 | 21.1 | 23 | 21.3 |
| 24. P.aerogunosa_YP_001345621.1 | 24.2 | 24.3 | 26.4 | 26.3 | 28.2 | 23.5 | 22.5 | 20.8 | 24.9 | 22.1 | 26.3 | 21.2 |
| 25. P.aeruginosa_NP_252880.1 | 26.8 | 25.1 | 27.5 | 29.9 | 29.2 | 24.9 | 23.1 | 18.8 | 25.5 | 23.3 | 26.1 | 23.2 |
| 26. G.zeae_XP_391616.1_FG11440.1 | 24.8 | 25.3 | 25.5 | 26.6 | 25 | 23.9 | 24.2 | 21.6 | 24.3 | 18.9 | 21.1 | 19.8 |
| 27. M.smegmatis_YP_884827.1 | 22.6 | 20.6 | 24.5 | 25.6 | 27 | 18.8 | 22.8 | 21.9 | 26.9 | 20.6 | 20.5 | 23.5 |
| 28. S.pombe_NP_588526.2 | 22.5 | 23.7 | 22.9 | 23.2 | 24.1 | 24.2 | 18.2 | 22.3 | 20.2 | 21.6 | 26.5 | 21.5 |
| 29. O.sativa_LOC_Os02g41954.1 | 23.6 | 23.9 | 25.3 | 27.9 | 24.7 | 23.9 | 29.5 | 26.8 | 29.3 | 26.5 | 25.8 | 25.3 |
| 30. P.patens_141764 | 29.2 | 29.4 | 28.4 | 26.5 | 29.4 | 29.9 | 26.2 | 27.6 | 26.3 | 26.3 | 25.1 | 29.3 |
| 31. P.trichocarpa_760976 | 27.9 | 26.8 | 26.4 | 27 | 25.9 | 25.3 | 26.5 | 25.4 | 26.1 | 26 | 29.2 | 25.7 |
| 32. A.mangium_EU252106 | 26.1 | 22.9 | 24.6 | 25.6 | 29 | 25.8 | 26.4 | 27.6 | 29.2 | 23 | 29 | 27.3 |
| 33. H.annuus_AM989990 | 27.1 | 25.9 | 23.8 | 25 | 27.4 | 26.8 | 27.4 | 25.9 | 28.4 | 24.2 | 25.5 | 26.7 |
| 34. P.vulgaris_U70532 | 26.2 | 27.3 | 25.7 | 26.1 | 26.5 | 26.3 | 26.2 | 25.3 | 28.3 | 25.4 | 28.6 | 27.5 |
| 35. G.hirsutum_AY895169 | 26.3 | 27 | 25.6 | 25.9 | 28 | 27.5 | 27.5 | 24.5 | 29.9 | 25.4 | 24.4 | 26.2 |
| 36. M.truncatula_AC152349_23.5 | 24.3 | 26.5 | 25.5 | 25.8 | 25.8 | 22 | 23.7 | 24.5 | 25.6 | 23.2 | 22.9 | 24 |
| 37. A.thaliana_AT2G34555.1 | 49.7 | 51 | 55.2 | 48.1 | 45.1 | 44 | 28.9 | 25.6 | 27.5 | 25.7 | 23.6 | 27.8 |
| 38. A.thaliana_AT1G78440.1 | | 56.2 | 54.6 | 51.3 | 47.8 | 44.1 | 28 | 25 | 25.5 | 25.7 | 25.1 | 27.2 |
| 39. H.annuus_FM872397 | | | 61.2 | 51.8 | 48.8 | 44.4 | 25.5 | 26.9 | 25.3 | 23.8 | 24.1 | 26.1 |
| 40. Pcoccineus_AJ132438 | | | | 57.2 | 53.2 | 46 | 25.5 | 28.3 | 28 | 26.1 | 22.3 | 27.8 |
| 41. S.bicolor_Sb03g035000.1 | | | | | 52.5 | 41.8 | 27.8 | 27.7 | 30.7 | 28.2 | 23.1 | 26.6 |
| 42. Zea_mays_EU951971 | | | | | | 37.2 | 27.2 | 24.8 | 32.5 | 23.5 | 21.4 | 25.2 |
| 43. M.truncatula_AC124961_21.4 | | | | | | | 25.8 | 27.2 | 24.5 | 24.4 | 23.9 | 27.2 |
| 44. A.thaliana_AT4G21690.1 | | | | | | | | 39.2 | 34.3 | 24.7 | 26.6 | 28 |
| 45. P.coccineus_AJ854305 | | | | | | | | | 33 | 24.6 | 24.8 | 27.7 |
| 46. O.sativa_LOC_Os01g08220.1 | | | | | | | | | | 25.7 | 22.3 | 25.4 |
| 47. P.patens_127644 | | | | | | | | | | | 26 | 26 |
| 48. A.thaliana_AT4G23340.1 | | | | | | | | | | | | 24.3 |
| 49. A.thaliana_AT1G78550.1 | | | | | | | | | | | | |
| 50. H.annuus_EF469861 | | | | | | | | | | | | |
| 51. S.lycopersicum_TC196004 | | | | | | | | | | | | |
| 52. P.trichocarpa_550094 | | | | | | | | | | | | |
| 53. O.sativa_LOC_Os10g40880.1 | | | | | | | | | | | | |
| 54. T.aestivum_c54899629@17382 | | | | | | | | | | | | |
| 55. Z.mays_ZM07MC20186_BFb0126L23 | | | | | | | | | | | | |
| 56. S.bicolor_Sb02g007240.1 | | | | | | | | | | | | |
| 57. Zea_mays_EU972786 | | | | | | | | | | | | |
| 58. P.trichocarpa_578863 | | | | | | | | | | | | |
| 59. M.truncatula_TC119720 | | | | | | | | | | | | |
| 60. G.max_TC252707 | | | | | | | | | | | | |
| 61. S.bicolor_Sb10g005210.1 | | | | | | | | | | | | |

| | 50 | 51 | 52 | 53 | 54 | 55 | 56 | 57 | 58 | 59 | 60 | 61 |
|---|---|---|---|---|---|---|---|---|---|---|---|---|
| 1. G.hirsutum_EU921264 | 28.7 | 31.3 | 28.3 | 30.8 | 29.5 | 25.6 | 27.8 | 26.4 | 29.8 | 31 | 30.1 | 28.8 |
| 2. H.pilosella_EU561015 | 28 | 30.5 | 29.9 | 30.7 | 28.9 | 28.5 | 26.1 | 26.8 | 28.1 | 29.4 | 29 | 28.7 |
| 3. A.thaliana_AT3G11180 | 31.5 | 32.1 | 29.1 | 31.7 | 32.4 | 28.6 | 32 | 32.2 | 30.5 | 29.8 | 27.7 | 28.8 |
| 4. P.trichocarpa_560919 | 32.5 | 33.1 | 32.6 | 37.2 | 34.1 | 34.2 | 33.6 | 34.1 | 31.4 | 33.8 | 32.3 | 35.6 |
| 5. P.trichocarpa_646527 | 30.2 | 32.6 | 30.2 | 31.1 | 29.8 | 28.6 | 28.8 | 26.6 | 30.2 | 32.2 | 30.8 | 31 |
| 6. G.max_TC240789 | 31.3 | 31.8 | 33.2 | 33.1 | 30.6 | 28.5 | 30.5 | 26.7 | 31.8 | 34 | 31.2 | 31.7 |
| 7. S.bicolor_Sb03g038880 | 32.1 | 31.5 | 30.1 | 33.2 | 33.9 | 34.3 | 29.6 | 33.3 | 28.7 | 30.9 | 31.9 | 34.2 |
| 8. A.thaliana_AT2G38240 | 34.8 | 36.2 | 35.8 | 36.6 | 35 | 34.6 | 36.3 | 36.8 | 32.7 | 34.3 | 35.2 | 34.9 |
| 9. A.thaliana_AT4G22880 | 30.3 | 31.6 | 31.2 | 32.2 | 29.9 | 27.8 | 28.6 | 27.7 | 28.8 | 29.3 | 28.7 | 29.2 |
| 10. A.thaliana_AT5G05600 | 33.2 | 33.6 | 32.6 | 33.3 | 34 | 32.4 | 34 | 33.7 | 32 | 32.7 | 30.7 | 33.5 |
| 11. O.sativa_LOC_Os11g25060 | 31.4 | 31.7 | 31.9 | 28.6 | 30.6 | 30.7 | 28.3 | 29.9 | 29.9 | 29.8 | 30.6 | 31.5 |
| 12. O.sativa_LOC_Os06g06720 | 33 | 28.3 | 29.6 | 29.6 | 29.7 | 32.4 | 27.9 | 31.1 | 31.5 | 31.2 | 30.6 | 31.6 |
| 13. A.andraeanum_AY232495 | 30.7 | 28.7 | 27.8 | 28.1 | 27.8 | 28.9 | 27.3 | 26.8 | 26.7 | 29.5 | 28 | 29.8 |
| 14. A.cepa_AY221248 | 30.2 | 29.9 | 29.4 | 31.3 | 29.8 | 27.1 | 28.6 | 27.7 | 28.7 | 28.7 | 29.2 | 29.1 |
| 15. O.sativa_LOC_Os02g52840.1 | 31.1 | 32.1 | 30.3 | 33.8 | 33.4 | 30.1 | 30.2 | 30.2 | 29.1 | 30.2 | 30.2 | 33.1 |
| 16. A.majus_DQ272591 | 31 | 32 | 30.6 | 32.3 | 32.6 | 28 | 32.2 | 27.4 | 31.3 | 32 | 30.9 | 32 |
| 17. A.thaliana_AT4G03070 | 19.7 | 23 | 22.5 | 21.5 | 20.9 | 20.1 | 22.7 | 19.3 | 22 | 22.9 | 22.8 | 20.4 |
| 18. P.patens_220256 | 22 | 22.5 | 25.7 | 25.3 | 26.4 | 24 | 21.1 | 23.4 | 21.8 | 22.5 | 23 | 24.5 |
| 19. M.truncatula_AC149079_25.4 | 23.1 | 23.9 | 27.7 | 24.5 | 22.6 | 22.7 | 20.4 | 19.9 | 23.3 | 23.8 | 24.3 | 24.4 |
| 20. S.lycopersicum_TC206577 | 24.9 | 25.6 | 25.2 | 26.9 | 24.4 | 22.5 | 23.7 | 24.9 | 26.1 | 27.1 | 24.4 | 24.9 |
| 21. A.fumigatus_XP_746433.2 | 23.1 | 21.8 | 21.9 | 20.6 | 22.3 | 22.5 | 21.9 | 23.6 | 23 | 22.3 | 22.6 | 21.9 |
| 22. P.stutzeri_YP_001173385.1 | 22.8 | 23.6 | 23 | 25.7 | 25.2 | 27.3 | 23.4 | 25.2 | 22.6 | 22.5 | 21.7 | 23.1 |
| 23. B.phymatum_YP_001861244.1 | 21.5 | 22.3 | 23.2 | 24.1 | 23 | 25.5 | 22.4 | 24.8 | 21.4 | 23.9 | 23.5 | 23.9 |
| 24. P.aerogunosa_YP_001345621.1 | 23.9 | 22.1 | 23.8 | 24.3 | 25.3 | 24.5 | 19.3 | 24.8 | 21.2 | 22.6 | 24.4 | 24.9 |
| 25. P.aeruginosa_NP_252880.1 | 23.4 | 22.4 | 25.1 | 24 | 22.7 | 25.4 | 20.5 | 27 | 22.6 | 22.8 | 24.6 | 25.1 |
| 26. G.zeae_XP_391616.1_FG11440.1 | 20.5 | 21.2 | 23.3 | 23 | 24 | 23.1 | 22.5 | 21.8 | 22.8 | 22.4 | 25.4 | 24.7 |
| 27. M.smegmatis_YP_884827.1 | 23.9 | 25.5 | 23.9 | 27.6 | 25.6 | 25.7 | 24.2 | 23.1 | 20.7 | 20.7 | 23.1 | 24.2 |
| 28. S.pombe_NP_588526.2 | 20.5 | 21 | 20.9 | 24 | 23.3 | 20.2 | 22 | 21.7 | 20.6 | 20.6 | 21.1 | 23.5 |
| 29. O.sativa_LOC_Os02g41954.1 | 30.9 | 29.2 | 27.2 | 26.4 | 28.6 | 28.3 | 29.4 | 28.5 | 25.9 | 25.7 | 26.3 | 26.3 |
| 30. P.patens_141764 | 29.1 | 27.5 | 29.9 | 27 | 28.5 | 29.6 | 27.1 | 27.5 | 25.1 | 28.7 | 27.7 | 27.7 |
| 31. P.trichocarpa_760976 | 27.3 | 29 | 26.9 | 27.6 | 28.8 | 27.1 | 26.2 | 24.5 | 24.6 | 25.4 | 24.5 | 27.6 |
| 32. A.mangium_EU252106 | 26.1 | 27.9 | 26.8 | 30 | 26.5 | 26.7 | 26.8 | 25.2 | 25.8 | 27.6 | 26.4 | 28.8 |
| 33. H.annuus_AM989990 | 28.2 | 29.2 | 25.9 | 29.8 | 26.2 | 25.7 | 26.1 | 26.7 | 24.3 | 28.3 | 25.2 | 27.1 |
| 34. P.vulgaris_U70532 | 26.7 | 29.3 | 26.4 | 30.1 | 27.1 | 25.5 | 25.6 | 25.7 | 25.9 | 29.2 | 27.9 | 27.7 |
| 35. G.hirsutum_AY895169 | 28 | 28.5 | 27.3 | 27.8 | 28.9 | 25.6 | 25.6 | 29.2 | 24.8 | 26.9 | 28.6 | 31.2 |
| 36. M.truncatula_AC152349_23.5 | 22.3 | 25.3 | 22.7 | 29.3 | 25.3 | 23.2 | 23.5 | 23.5 | 25.6 | 26.2 | 23.1 | 24.6 |
| 37. A.thaliana_AT2G34555.1 | 25.7 | 27.2 | 27.4 | 26.6 | 24.3 | 24 | 24.9 | 24.6 | 27 | 24.2 | 26 | 25.1 |
| 38. A.thaliana_AT1G78440.1 | 24.5 | 27.9 | 28.3 | 24.8 | 25.8 | 26.6 | 27.6 | 24.9 | 25.6 | 25.6 | 26.5 | 25.9 |
| 39. H.annuus_FM872397 | 23.9 | 25.3 | 27.4 | 28.8 | 23.4 | 25.1 | 27.7 | 25.8 | 27.4 | 26 | 26.2 | 25.8 |
| 40. Pcoccineus_AJ132438 | 24.2 | 25.4 | 25.5 | 26.6 | 24.5 | 25.3 | 25.3 | 25.4 | 25.8 | 24.2 | 25.5 | 25.3 |
| 41. S.bicolor_Sb03g035000.1 | 25.2 | 24.7 | 26.4 | 29.8 | 27.7 | 30.3 | 25.5 | 27.6 | 28.7 | 26.2 | 26.7 | 26.5 |
| 42. Zea_mays_EU951971 | 25.4 | 23.9 | 24.5 | 27 | 26.7 | 30.2 | 23.7 | 24.5 | 25.6 | 25.4 | 24.4 | 27 |
| 43. M.truncatula_AC124961_21.4 | 25.3 | 25.4 | 27.8 | 27.4 | 24.1 | 25.5 | 25.8 | 25.4 | 22.3 | 22.8 | 23.9 | 22.9 |
| 44. A.thaliana_AT4G21690.1 | 28.1 | 25 | 27 | 26.4 | 24.5 | 27.1 | 25.7 | 25.8 | 24.7 | 25.4 | 28.4 | 26 |
| 45. P.coccineus_AJ854305 | 28.9 | 26 | 25.2 | 25.8 | 26.4 | 27.5 | 27.5 | 24.8 | 28.4 | 27 | 27 | 24.9 |
| 46. O.sativa_LOC_Os01g08220.1 | 26.6 | 25.4 | 24.8 | 28.7 | 26.8 | 31.2 | 24.2 | 30 | 25.1 | 26.9 | 29.5 | 25.7 |
| 47. P.patens_127644 | 25.8 | 25.5 | 24.7 | 24.1 | 24.3 | 25.3 | 23.2 | 25.7 | 24 | 24 | 22.4 | 25.9 |
| 48. A.thaliana_AT4G23340.1 | 25.4 | 24.3 | 22.3 | 25.7 | 21.4 | 25.4 | 25.4 | 26.4 | 24.9 | 23.8 | 23.2 | 25.5 |
| 49. A.thaliana_AT1G78550.1 | 51.3 | 48 | 44.9 | 40.1 | 38.5 | 39.2 | 38.4 | 35.7 | 34.1 | 36 | 34.9 | 34.3 |
| 50. H.annuus_EF469861 | | 48.8 | 46.7 | 39.2 | 40.4 | 43.2 | 37.8 | 35.7 | 35.6 | 36.1 | 35.1 | 33.2 |
| 51. S.lycopersicum_TC196004 | | | 44.5 | 43.1 | 38.8 | 38.8 | 37 | 32.9 | 34 | 33.8 | 33.1 | 33.8 |
| 52. P.trichocarpa_550094 | | | | 37.6 | 35.1 | 36.7 | 36.4 | 34.1 | 33.8 | 32.6 | 34.7 | 33.7 |
| 53. O.sativa_LOC_Os10g40880.1 | | | | | 51.2 | 46.8 | 41.7 | 34.2 | 32.1 | 33.9 | 32.4 | 36.6 |
| 54. T.aestivum_c54899629@17382 | | | | | | 43.5 | 40.5 | 34.7 | 36.3 | 36.5 | 34.1 | 37.2 |
| 55. Z.mays_ZM07MC20186_BFb0126L23 | | | | | | | 42.7 | 39.4 | 31.3 | 34.3 | 31.5 | 32.9 |
| 56. S.bicolor_Sb02g007240.1 | | | | | | | | 34.1 | 33.9 | 33.5 | 31.3 | 31.6 |
| 57. Zea_mays_EU972786 | | | | | | | | | 32.9 | 30.6 | 34.5 | 32.7 |
| 58. P.trichocarpa_578863 | | | | | | | | | | 54.6 | 50 | 43.5 |
| 59. M.truncatula_TC119720 | | | | | | | | | | | 46.5 | 41.9 |
| 60. G.max_TC252707 | | | | | | | | | | | | 43.3 |
| 61. S.bicolor_Sb10g005210.1 | | | | | | | | | | | | |

[0674] 3.2. YRP5 polypeptides Global percentages of similarity and identity between full length polypeptide sequences is determined using one of the methods available in the art, the MatGAT (Matrix Global Alignment Tool) software (BMC Bioinformatics. 2003 4:29. MatGAT: an application that generates similarity/identity matrices using protein or DNA sequences. Campanella J J, Bitincka L, Smalley J; software hosted by Ledion Bitincka). MatGAT software generates similarity/identity matrices for DNA or protein sequences without needing pre-alignment of the data. The program performs a series of pair-wise alignments using the Myers and Miller global alignment algorithm (with a gap opening penalty of 12, and a gap extension penalty of 2), calculates similarity and identity using for example Blosum 62 (for polypeptides), and then places the results in a distance matrix. Sequence similarity is shown in the bottom half of the dividing line and sequence identity is shown in the top half of the diagonal dividing line.

[0675] Parameters used in the comparison are:
[0676] Scoring matrix: Blosum62
[0677] First Gap: 12
[0678] Extending gap: 2

[0679] A MATGAT table for local alignment of a specific domain, or data on % identity/similarity between specific domains may also be performed.

### 3.3. Casein Kinase Type I (CK1) Polypeptides

[0680] Global percentages of similarity and identity between full length polypeptide sequences useful in performing the methods of the invention were determined using one of the methods available in the art, the MatGAT (Matrix Global Alignment Tool) software (BMC Bioinformatics. 2003 4:29. MatGAT: an application that generates similarity/identity matrices using protein or DNA sequences. Campanella J J, Bitincka L, Smalley J; software hosted by Ledion Bitincka). MatGAT software generates similarity/identity matrices for DNA or protein sequences without needing pre-alignment of the data. The program performs a series of pair-wise alignments using the Myers and Miller global alignment algorithm (with a gap opening penalty of 12, and a gap extension penalty of 2), calculates similarity and identity using for example Blosum 62 (for polypeptides), and then places the results in a distance matrix. Sequence similarity is shown in the bottom half of the dividing line and sequence identity is shown in the top half of the diagonal dividing line.

[0681] Parameters used in the comparison were:
[0682] Scoring matrix: Blosum62
[0683] First Gap: 12
[0684] Extending gap: 2

[0685] Results of the software analysis are shown in Table B2 for the global identity over the full length of the polypeptide sequences.

[0686] The percentage identity between the CK1 polypeptide sequences on Table B2 range from 92% to 94% compared to SEQ ID NO: 195.

TABLE B2
MatGAT results for global similarity and identity over the full length of the polypeptide sequences.

| | 1 | 2 | 3 | 4 | 5 | 6 | 7 | 8 | 9 | 13 | 17 | 20 | 28 | 32 | 37 |
|---|---|---|---|---|---|---|---|---|---|---|---|---|---|---|---|
| 1. A.thaliana_AT1G03930.1 | | 92 | 92 | 86 | 98 | 94 | 98 | 90 | 96 | 92 | 92 | 90 | 92 | 90 | 90 |
| 2. A.thaliana_AT1G04440.1 | | | 100 | 94 | 94 | 98 | 94 | 98 | 92 | 96 | 96 | 94 | 96 | 94 | 90 |
| 3. A.thaliana_AT3G23340.1 | | | | 94 | 94 | 98 | 94 | 98 | 92 | 96 | 96 | 94 | 96 | 94 | 90 |
| 4. A.thaliana_AT4G14340.1 | | | | | 88 | 92 | 88 | 96 | 86 | 90 | 90 | 88 | 90 | 88 | 84 |
| 5. A.thaliana_AT4G28540.1 | | | | | | 96 | 96 | 92 | 98 | 94 | 94 | 92 | 94 | 92 | 92 |
| 6. A.thaliana_AT5G43320.1 | | | | | | | 92 | 96 | 94 | 98 | 94 | 92 | 94 | 92 | 92 |
| 7. A.thaliana_AT5G44100.1 | | | | | | | | 92 | 94 | 90 | 94 | 92 | 94 | 92 | 88 |
| 8. B.napus_BN06MC08360_4272 | | | | | | | | | 90 | 94 | 94 | 92 | 94 | 92 | 88 |
| 9. B.napus_BN06MC29527_5136 | | | | | | | | | | 94 | 96 | 94 | 92 | 94 | 94 |
| 13. G.max_GM06MC19561_597012 | | | | | | | | | | | 94 | 92 | 92 | 92 | 92 |
| 17. L.usitatissimum_LU04MC11 | | | | | | | | | | | | 98 | 96 | 98 | 94 |
| 20. O.sativa_LOC_Os02g40860. | | | | | | | | | | | | | 94 | 100 | 96 |
| 28. P.trichocarpa_scaff_XIII | | | | | | | | | | | | | | 94 | 90 |
| 32. T.aestivum_TA72195_4565 | | | | | | | | | | | | | | | 96 |
| 37. Z.mays_ZM07MC21747_BFb02 | | | | | | | | | | | | | | | |

3.4. Basic Helix Loop Helix group 12 (bHLH12-like) polypeptides Global percentages of similarity and identity between full length polypeptide sequences useful in performing the methods of the invention were determined using one of the methods available in the art, the MatGAT (Matrix Global Alignment Tool) software (BMC Bioinformatics. 2003 4:29. MatGAT: an application that generates similarity/identity matrices using protein or DNA sequences. Campanella J J, Bitincka L, Smalley J; software hosted by Ledion Bitincka). MatGAT software generates similarity/identity matrices for DNA or protein sequences without needing pre-alignment of the data. The program performs a series of pair-wise alignments using the Myers and Miller global alignment algorithm (with a gap opening penalty of 12, and a gap extension penalty of 2), calculates similarity and identity using for example Blosum 62 (for polypeptides), and then places the results in a distance matrix. Sequence similarity is shown in Table B3 in the bottom half of the dividing line and sequence identity is shown in the top half of the diagonal dividing line.

[0687] Parameters used in the comparison were:
[0688] Scoring matrix: Blosum62
[0689] First Gap: 12
[0690] Extending gap: 2

[0691] The percentage identity between the bHLH12-like polypeptide sequences on Table B3 range from 92% to 94% compared to SEQ ID NO: 280.

TABLE B3
MatGAT results for global similarity and identity over the full length of the polypeptide sequences.

| | 1 | 6 | 7 | 8 | 17 | 19 | 20 | 22 | 23 | 24 | 28 | 29 |
|---|---|---|---|---|---|---|---|---|---|---|---|---|
| 1. Poptr_TA1 | | 46.20 | 46.20 | 44.70 | 33.20 | 30.10 | 31.90 | 48.30 | 33.30 | 99.80 | 29.90 | 29.60 |
| 6. G.max_Gm0017x00130 | 68.10 | | 67.40 | 64.30 | 32.10 | 29.10 | 29.80 | 57.70 | 32.70 | 46.20 | 30.40 | 30.20 |
| 7. G.max_Gm0119x00198 | 65.00 | 77.50 | | 59.90 | 28.50 | 27.90 | 30.00 | 61.90 | 30.60 | 46.20 | 29.40 | 29.20 |
| 8. M.truncatula_AC171266_17.4 | 61.80 | 76.50 | 68.80 | | 32.20 | 30.60 | 28.20 | 51.50 | 30.70 | 44.50 | 33.10 | 32.90 |
| 17. O.sativa_Os08g0524800 | 45.20 | 48.70 | 41.80 | 48.80 | | 57.10 | 27.10 | 33.00 | 31.00 | 33.30 | 70.70 | 70.00 |
| 19. O.sativa_TA48480_4530 | 41.50 | 42.90 | 38.70 | 46.00 | 68.40 | | 26.10 | 31.30 | 29.50 | 29.40 | 53.20 | 52.50 |
| 20. P.patens_171809 | 46.80 | 46.80 | 46.20 | 44.70 | 37.00 | 34.50 | | 30.60 | 32.10 | 32.20 | 25.70 | 25.60 |
| 22. P.trichocarpa_553223 | 68.50 | 74.10 | 77.00 | 69.10 | 44.20 | 41.90 | 47.40 | | 32.00 | 48.50 | 31.50 | 31.20 |
| 23. P.trichocarpa_566736 | 55.10 | 50.90 | 49.80 | 47.70 | 43.20 | 40.40 | 47.90 | 52.40 | | 33.10 | 29.80 | 29.00 |
| 24. P.trichocarpa_572918 | 100.00 | 68.50 | 65.40 | 61.80 | 45.20 | 40.80 | 47.10 | 68.50 | 54.80 | | 30.10 | 29.80 |
| 28. Z.mays_TA192877.4577 | 40.50 | 44.70 | 41.60 | 49.00 | 80.00 | 64.90 | 35.70 | 43.00 | 41.50 | 40.50 | | 99.30 |
| 29. Z.mays_ZM07MC34166_BFb0333O07 | 40.10 | 44.00 | 41.10 | 48.40 | 79.50 | 64.50 | 35.40 | 42.60 | 40.70 | 40.10 | 99.50 | |

3.5. Alcohol Dehydrogenase (ADH2) Polypeptides Global percentages of similarity and identity between full length ADH2 polypeptide sequences useful in performing the methods of the invention were determined using one of the methods available in the art, the MatGAT (Matrix Global Alignment Tool) software (BMC Bioinformatics. 2003 4:29. MatGAT: an application that generates similarity/identity matrices using protein or DNA sequences. Campanella J J, Bitincka L, Smalley J; software hosted by Ledion Bitincka). MatGAT software generates similarity/identity matrices for DNA or protein sequences without needing pre-alignment of the data. The program performs a series of pair-wise alignments using the Myers and Miller global alignment algorithm (with a gap opening penalty of 12, and a gap extension penalty of 2), calculates similarity and identity using for example Blosum 62 (for polypeptides), and then places the results in a distance matrix. Sequence similarity is shown in the bottom half of the dividing line and sequence identity is shown in the top half of the diagonal dividing line.

[0692] Parameters used in the comparison are:
[0693] Scoring matrix: Blosum62
[0694] First Gap: 12
[0695] Extending gap: 2

### 3.6. GCN5-Like Polypeptides

[0696] Global percentages of similarity and identity between full length polypeptide sequences useful in performing the methods of the invention were determined using one of the methods available in the art, the MatGAT (Matrix Global Alignment Tool) software (BMC Bioinformatics. 2003 4:29. MatGAT: an application that generates similarity/identity matrices using protein or DNA sequences. Campanella J J, Bitincka L, Smalley J; software hosted by Ledion Bitincka). MatGAT software generates similarity/identity matrices for DNA or protein sequences without needing pre-alignment of the data. The program performs a series of pair-wise alignments using the Myers and Miller global alignment algorithm (with a gap opening penalty of 12, and a gap extension penalty of 2), calculates similarity and identity using for example Blosum 62 (for polypeptides), and then places the results in a distance matrix. Sequence similarity is shown in Table B4 in the bottom half of the dividing line and sequence identity is shown in the top half of the diagonal dividing line.

[0697] Parameters used in the comparison were:
[0698] Scoring matrix: Blosum62
[0699] First Gap: 12
[0700] Extending gap: 2

[0701] The percentage identity between the GCN5-like polypeptide sequences useful in performing the methods of the invention can be as low as 26.90% amino acid identity compared to SEQ ID NO: 460.

TABLE B4
MatGAT results for global similarity and identity over the full length of the polypeptide sequences.

| | 1 | 2 | 3 | 4 | 5 | 6 | 7 | 8 | 9 | 10 | 11 |
|---|---|---|---|---|---|---|---|---|---|---|---|
| 1. H._vulgare_AK252049 | | 87.90 | 85.50 | 93.10 | 85.70 | 57.00 | 63.00 | 63.20 | 63.00 | 53.30 | 56.50 |
| 2. O.sativa_ Os10g28040 | | | 90.70 | 85.20 | 89.70 | 58.50 | 64.50 | 64.60 | 63.30 | 55.00 | 57.50 |
| 3. S.bicolor_Sb01g021950.1 | | | | 84.10 | 94.60 | 58.20 | 63.50 | 63.00 | 62.20 | 53.60 | 56.90 |
| 4. Ta_GCN5 | | | | | 83.30 | 56.20 | 63.40 | 63.20 | 62.10 | 51.70 | 57.40 |
| 5. Zea_mays_AF440227 | | | | | | 56.80 | 63.10 | 63.00 | 61.10 | 53.30 | 56.80 |
| 6. A.thaliana_AT3G54610.1 | | | | | | | 73.20 | 73.90 | 73.50 | 57.40 | 50.20 |
| 7. G.max_Glyma03g31490.1 | | | | | | | | 96.30 | 81.20 | 61.30 | 53.30 |
| 8. G.max_Glyma19g34340.1 | | | | | | | | | 80.80 | 61.20 | 55.00 |
| 9. P.trichocarpa_421007 | | | | | | | | | | 60.40 | 52.10 |
| 10. P.sitchensis_WS0277_C21 | | | | | | | | | | | 52.70 |
| 11. S.moellendorffi_139448 | | | | | | | | | | | |
| 12. P.patens_HAG1501 | | | | | | | | | | | |
| 13. C.reinhardtii_142398 | | | | | | | | | | | |
| 14. C.vulgaris_43427 | | | | | | | | | | | |
| 15. O.lucimarinus_33057 | | | | | | | | | | | |
| 16. O.RCC809_28620 | | | | | | | | | | | |
| 17. O.taurii_34304 | | | | | | | | | | | |
| 18. S.cerevisiae_GCN5 | | | | | | | | | | | |
| 19. D.discoidum_GCN5 | | | | | | | | | | | |
| 20. H.sapiens_GCN5 | | | | | | | | | | | |
| 21. P.tricornutum_HAG15203 | | | | | | | | | | | |

| | 12 | 13 | 14 | 15 | 16 | 17 | 18 | 19 | 20 | 21 |
|---|---|---|---|---|---|---|---|---|---|---|
| 1. Hordeum_vulgare_AK252049 | 56.80 | 38.10 | 42.00 | 38.70 | 40.40 | 40.40 | 36.60 | 35.20 | 35.90 | 32.30 |
| 2. O.sativa_LOC_Os10g28040.1 | 58.20 | 38.70 | 41.30 | 39.70 | 40.20 | 39.60 | 36.50 | 35.40 | 37.30 | 32.50 |
| 3. S.bicolor_Sb01g021950.1 | 57.00 | 38.30 | 42.40 | 39.90 | 40.50 | 39.70 | 37.40 | 35.00 | 36.70 | 32.50 |
| 4. Ta_GCN5 | 58.10 | 39.60 | 43.80 | 40.70 | 41.70 | 41.40 | 37.20 | 36.10 | 36.70 | 32.80 |
| 5. Zea_mays_AF440227 | 56.10 | 37.80 | 41.60 | 39.50 | 39.90 | 39.20 | 36.20 | 35.70 | 36.90 | 33.10 |
| 6. A.thaliana_AT3G54610.1 | 49.30 | 35.20 | 37.30 | 35.80 | 36.40 | 35.00 | 35.40 | 29.90 | 32.50 | 30.80 |
| 7. G.max_Glyma03g31490.1 | 55.00 | 36.80 | 41.50 | 37.30 | 39.40 | 37.70 | 36.60 | 32.20 | 34.10 | 30.60 |
| 8. G.max_Glyma19g34340.1 | 55.00 | 36.70 | 41.00 | 37.50 | 39.60 | 37.90 | 36.80 | 32.40 | 33.90 | 30.40 |
| 9. P.trichocarpa_421007 | 52.90 | 35.80 | 40.60 | 36.90 | 36.90 | 35.90 | 35.10 | 31.90 | 33.60 | 29.80 |
| 10. P.sitchensis_WS0277_C21 | 50.70 | 33.40 | 35.10 | 33.20 | 33.10 | 32.60 | 30.70 | 29.00 | 30.60 | 26.90 |
| 11. S.moellendorffi_139448 | 58.70 | 36.30 | 42.50 | 39.90 | 40.10 | 38.40 | 38.80 | 34.30 | 35.90 | 32.90 |
| 12. P.patens_HAG1501 | | 37.40 | 39.10 | 40.50 | 42.10 | 39.70 | 36.40 | 33.30 | 31.60 | 31.80 |
| 13. C.reinhardtii_142398 | | | 43.70 | 38.10 | 38.30 | 37.50 | 35.20 | 32.70 | 32.10 | 30.90 |
| 14. C.vulgaris_43427 | | | | 40.00 | 40.60 | 39.00 | 39.70 | 38.40 | 35.50 | 34.40 |
| 15. O.lucimarinus_33057 | | | | | 77.20 | 75.80 | 38.10 | 38.60 | 33.70 | 31.20 |
| 16. O.RCC809_28620 | | | | | | 77.60 | 37.30 | 36.00 | 33.50 | 30.70 |
| 17. O.taurii_34304 | | | | | | | 38.30 | 35.50 | 32.20 | 31.00 |
| 18. S.cerevisiae_GCN5 | | | | | | | | 38.20 | 38.10 | 30.70 |
| 19. D.discoidum_GCN5 | | | | | | | | | 35.00 | 31.60 |
| 20. H.sapiens_GCN5 | | | | | | | | | | 33.40 |
| 21. P.tricornutum_HAG15203 | | | | | | | | | | |

### Example 4

### Identification of Domains Comprised in Polypeptide Sequences Useful in Performing the Methods of the Invention

### 4.1. Leucoanthocyanidin Dioxygenase (LDOX) Polypeptides

[0702] The Integrated Resource of Protein Families, Domains and Sites (InterPro) database is an integrated interface for the commonly used signature databases for text- and sequence-based searches. The InterPro database combines these databases, which use different methodologies and varying degrees of biological information about well-characterized proteins to derive protein signatures. Collaborating databases include SWISS-PROT, PROSITE, TrEMBL, PRINTS, Propom and Pfam, Smart and TIGRFAMs. Pfam is a large collection of multiple sequence alignments and hidden Markov models covering many common protein domains and families. Pfam is hosted at the Sanger Institute server in the United Kingdom. Interpro is hosted at the European Bioinformatics Institute in the United Kingdom.

[0703] The results of the InterPro scan of the polypeptide sequence as represented by SEQ ID NO: 2 are presented in Table C1.

TABLE C1
InterPro scan results (major accession numbers) of the
polypeptide sequence as represented by SEQ ID NO: 2.

| | | | Amino acid coordinates |
|---|---|---|---|
| Database | Accession number | Accession name | on SEQ ID NO 2 |
| InterPro | IPR002283 | Isopenicillin N synthase | / |
| FPrintScan | PR00682 | IPNSYNTHASE | T[85-102] 7.8E−8 |
| | | | T[280-306] 7.8E−8 |
| InterPro | IPR005123 | 2OG-Fe(II) oxygenase | / |
| HMMPfam | PF03171 | 2OG-FeII_Oxy | T[220-320] 6.50E−42 |
| InterPro | NULL | NULL | / |
| Gene3D | G3DSA: 2.60.120.330 | G3DSA: 2.60.120.330 | T[21-368] 9.20E−112 |
| HMMPanther | PTHR10209 | PTHR10209 | T[79-369] 0.0 |
| | | | T[79-369] 0.0 |
| HMMPanther | PTHR10209: SF19 | PTHR10209: SF19 | T[79-369] 0.0 |
| | | | T[79-369] 0.0 |
| Superfamily | SSF51197 | SSF51197 | T[22-362] 6.1E−110 |

### 4.2. YRP5 Polypeptides

[0704] The Integrated Resource of Protein Families, Domains and Sites (InterPro) database is an integrated interface for the commonly used signature databases for text- and sequence-based searches. The InterPro database combines these databases, which use different methodologies and varying degrees of biological information about well-characterized proteins to derive protein signatures. Collaborating databases include SWISS-PROT, PROSITE, TrEMBL, PRINTS, Propom and Pfam, Smart and TIGRFAMs. Pfam is a large collection of multiple sequence alignments and hidden Markov models covering many common protein domains and families. Pfam is hosted at the Sanger Institute server in the United Kingdom. Interpro is hosted at the European Bioinformatics Institute in the United Kingdom.

### 4.3. Casein Kinase Type I (CK1) Polypeptides

[0705] The Integrated Resource of Protein Families, Domains and Sites (InterPro) database is an integrated interface for the commonly used signature databases for text- and sequence-based searches. The InterPro database combines these databases, which use different methodologies and varying degrees of biological information about well-characterized proteins to derive protein signatures. Collaborating databases include SWISS-PROT, PROSITE, TrEMBL, PRINTS, Propom and Pfam, Smart and TIGRFAMs. Pfam is a large collection of multiple sequence alignments and hidden Markov models covering many common protein domains and families. Pfam is hosted at the Sanger Institute server in the United Kingdom. Interpro is hosted at the European Bioinformatics Institute in the United Kingdom.

[0706] The results of the InterPro scan of the polypeptide sequence as represented by SEQ ID NO: 195 are presented in Table C2.

TABLE C2
InterPro scan results (major accession numbers) of the
polypeptide sequence as represented by SEQ ID NO: 2.

| Method | Acc Number | Short Name | Location |
|---|---|---|---|
| IPR000719 | Protein kinase, core | | |
| PRODOM | PD000001 | Prot_kinase | 0.0 [9-248]T |
| PROFILE | PS50011 | PROTEIN_KINASE_DOM | 0.0 [9-278]T |
| IPR011009 | Protein kinase-like | | |
| SUPERFAMILY | SSF56112 | Kinase_like | 6.8E−64 [1-299]T |
| IPR017442 | Serine/threonine protein | | |
| | kinase-related | | |
| PFAM | PF00069 | Pkinase | 4.6E−36 [9-232]T |
| noIPR | unintegrated | | |
| GENE3D | G3DSA: 1.10.510.10 | G3DSA: 1.10.510.10 | 3.3E−54 [85-293]T |
| GENE3D | G3DSA: 3.30.200.20 | G3DSA: 3.30.200.20 | 4.0E−29 [2-84]T |
| PANTHER | PTHR11909 | PTHR11909 | 0.0 [19-404]T 0.0 [19-404]T |
| PANTHER | PTHR11909: SF18 | PTHR11909: SF18 | 0.0 [19-404]T 0.0 [19-404]T |

4.4. Basic Helix Loop Helix Group 12 (bHLH12-Like) Polypeptides

[0707] The Integrated Resource of Protein Families, Domains and Sites (InterPro) database is an integrated interface for the commonly used signature databases for text- and sequence-based searches. The InterPro database combines these databases, which use different methodologies and varying degrees of biological information about well-characterized proteins to derive protein signatures. Collaborating databases include SWISS-PROT, PROSITE, TrEMBL, PRINTS, Propom and Pfam, Smart and TIGRFAMs. Pfam is a large collection of multiple sequence alignments and hidden Markov models covering many common protein domains and families. Pfam is hosted at the Sanger Institute server in the United Kingdom. Interpro is hosted at the European Bioinformatics Institute in the United Kingdom.

[0708] The results of the InterPro scan of the polypeptide sequence as represented by SEQ ID NO: 280 are presented in Table C3.

TABLE C3
InterPro scan results (major accession numbers) of the polypeptide sequence as represented by SEQ ID NO: 280.

| Method | Accession | Interpro | Domain | start | stop | E-value | Domain name | Annotation |
|---|---|---|---|---|---|---|---|---|
| Gene3D | G3DSA: | IPR011598 | no description | 371 | 452 | 4.00E−07 | Helix-loop- | Cellular Component: |
| | 4.10.280.10 | | | | | | helix | nucleus |
| | | | | | | | DNA-binding | (GO: 0005634), |
| | | | | | | | | Molecular Function: |
| | | | | | | | | transcription regulator |
| | | | | | | | | activity |
| | | | | | | | | (GO: 0030528), |
| | | | | | | | | Biological Process: |
| | | | | | | | | regulation of |
| | | | | | | | | transcription |
| | | | | | | | | (GO: 0045449) |
| HMMPanther | PTHR12565: | NULL | CENTROMERE- | 378 | 425 | 8.90E−07 | NULL | |
| | SF7 | | BINDING PROTEIN | | | | | |
| | | | 1, CBP-1 | | | | | |
| HMMPanther | PTHR12565 | NULL | STEROL REGULATORY | 378 | 425 | 8.90E−07 | NULL | |
| | | | ELEMENT-BINDING | | | | | |
| | | | PROTEIN | | | | | |
| HMMSmart | SM00353 | IPR001092 | HLH | 381 | 431 | 5.50E−10 | Basic helix- | Cellular Component: |
| | | | | | | | loop-helix | nucleus |
| | | | | | | | dimerisation | (GO: 0005634), |
| | | | | | | | region bHLH | Molecular Function: |
| | | | | | | | | transcription regulator |
| | | | | | | | | activity |
| | | | | | | | | (GO: 0030528), |
| | | | | | | | | Biological Process: |
| | | | | | | | | regulation of |
| | | | | | | | | transcription |
| | | | | | | | | (GO: 0045449) |
| ProfileScan | PS50888 | IPR001092 | HLH | 369 | 426 | 11,765 | Basic helix- | Cellular Component: |
| | | | | | | | loop-helix | nucleus |
| | | | | | | | dimerisation | (GO: 0005634), |
| | | | | | | | region bHLH | Molecular Function: |
| | | | | | | | | transcription regulator |
| | | | | | | | | activity |
| | | | | | | | | (GO: 0030528), |
| | | | | | | | | Biological Process: |
| | | | | | | | | regulation of |
| | | | | | | | | transcription |
| | | | | | | | | (GO: 0045449) |
| HMMPfam | PF00010 | IPR001092 | HLH | 376 | 426 | 1.80E−06 | Basic helix- | Cellular Component: |
| | | | | | | | loop-helix | nucleus |
| | | | | | | | dimerisation | (GO: 0005634), |
| | | | | | | | region bHLH | Molecular Function: |
| | | | | | | | | transcription regulator |
| | | | | | | | | activity |
| | | | | | | | | (GO: 0030528), |
| | | | | | | | | Biological Process: |
| | | | | | | | | regulation of |
| | | | | | | | | transcription |
| | | | | | | | | (GO: 0045449) |
| superfamily | SSF47459 | IPR011598 | HLH, helix-loop- | 373 | 458 | 2.00E−16 | Helix-loop- | Cellular Component: |
| | | | helix DNA-binding | | | | helix | nucleus |
| | | | domain | | | | DNA-binding | (GO: 0005634), |
| | | | | | | | | Molecular Function: |
| | | | | | | | | transcription regulator |
| | | | | | | | | activity |
| | | | | | | | | (GO: 0030528), |
| | | | | | | | | Biological Process: |
| | | | | | | | | regulation of |
| | | | | | | | | transcription |
| | | | | | | | | (GO: 0045449) |

### 4.5. Alcohol Dehydrogenase (ADH2) Polypeptides

[0709] The Integrated Resource of Protein Families, Domains and Sites (InterPro) database is an integrated interface for the commonly used signature databases for text- and sequence-based searches. The InterPro database combines these databases, which use different methodologies and varying degrees of biological information about well-characterized proteins to derive protein signatures. Collaborating databases include SWISS-PROT, PROSITE, TrEMBL, PRINTS, Propom and Pfam, Smart and TIGRFAMs. Pfam is a large collection of multiple sequence alignments and hidden Markov models covering many common protein domains and families. Pfam is hosted at the Sanger Institute server in the United Kingdom. Interpro is hosted at the European Bioinformatics Institute in the United Kingdom.

[0710] The results of the InterPro scan of the polypeptide sequence as represented by SEQ ID NO:413 are presented in Table C4.

[0711] In particular, the following domains were identified:

[0712] IPR002085: alcohol dehydrogenase superfamily, Zn-containing
[0713] PTHR11695: alcohol dehydrogenase related

[0714] IPR002328: alcohol dehydrogenase, Zn-containing, conserved site
[0715] PS00059: ADH ZINC

[0716] IPRO11032: GroES-like
[0717] SSF50129: GroES-like

[0718] IPRO13149: alcohol dehydrogenase, Zn_binding
[0719] PF00107: ADH_Zinc_N

[0720] IPRO13154: alcohol dehydrogenase, GroES-like
[0721] PF08240: ADH_N

[0722] IPRO1418: alcohol dehydrogenase, class III S-(hydroxymethyl) glutathione dehydrogenase
[0723] TIGRO2818: adh_III_F_hyde: S-(hydroxymethyl)glutathione

[0724] G3DSA:3.90.180.10 (no description)

[0725] PTHR11695:SF4: alcohol dehydrogenase

### 4.6. GCN5-Like Polypeptides

[0726] The Integrated Resource of Protein Families, Domains and Sites (InterPro) database is an integrated interface for the commonly used signature databases for text- and sequence-based searches. The InterPro database combines these databases, which use different methodologies and varying degrees of biological information about well-characterized proteins to derive protein signatures. Collaborating databases include SWISS-PROT, PROSITE, TrEMBL, PRINTS, Propom and Pfam, Smart and TIGRFAMs. Pfam is a large collection of multiple sequence alignments and hidden Markov models covering many common protein domains and families. Pfam is hosted at the Sanger Institute server in the United Kingdom. Interpro is hosted at the European Bioinformatics Institute in the United Kingdom.

[0727] The results of the InterPro scan of the polypeptide sequence as represented by SEQ ID NO: 460 are presented in Table C5.

TABLE C5
InterPro scan results (major accession numbers) of the
polypeptide sequence as represented by SEQ ID NO: 460.

| Method | Accession | Domain | start | stop | E-value |
|---|---|---|---|---|---|
| HMMSmart | SM00297 | BROMO | 371 | 480 | 6.00E−38 |
| HMMPanther | PTHR22880: SF6 | HISTONE ACETYLTRANS- | 128 | 476 | 3.20E−198 |
| | | FERASE GCN5 | | | |
| HMMPanther | PTHR22880 | FALZ-RELATED | 128 | 476 | 3.20E−198 |
| | | BROMODOMAIN- | | | |
| | | CONTAINING PROTEINS | | | |
| FPrintScan | PR00503 | BROMODOMAIN | 393 | 406 | 3.90E−15 |
| FPrintScan | PR00503 | BROMODOMAIN | 407 | 423 | 3.90E−15 |
| FPrintScan | PR00503 | BROMODOMAIN | 442 | 461 | 3.90E−15 |
| superfamily | SSF47370 | Bromodomain | 352 | 481 | 8.10E−34 |
| superfamily | SSF55729 | Acyl-CoA N-acyltransferases | 150 | 297 | 2.10E−31 |
| | | (Nat) | | | |
| Gene3D | G3DSA: 3.40.630.30 | no description | 136 | 295 | 2.20E−68 |
| Gene3D | G3DSA: 1.20.920.10 | no description | 354 | 478 | 5.50E−31 |
| HMMPfam | PF00583 | Acetyltransf_1 | 186 | 262 | 7.80E−16 |
| HMMPfam | PF00439 | Bromodomain | 382 | 466 | 1.60E−35 |
| ScanRegExp | PS00633 | BROMODOMAIN_1 | 395 | 453 | NA |
| ProfileScan | PS50014 | BROMODOMAIN_2 | 390 | 461 | 20.724 |
| ProfileScan | PS51186 | GNAT | 143 | 290 | 17.291 |

### Example 5

### Topology Prediction of the Polypeptide Sequences Useful in Performing the Methods of the Invention

### 5.1. Leucoanthocyanidin Dioxygenase (LDOX) Polypeptides

[0728] TargetP 1.1 predicts the subcellular location of eukaryotic proteins. The location assignment is based on the predicted presence of any of the N-terminal pre-sequences: chloroplast transit peptide (cTP), mitochondrial targeting peptide (mTP) or secretory pathway signal peptide (SP). Scores on which the final prediction is based are not really probabilities, and they do not necessarily add to one. However, the location with the highest score is the most likely according to TargetP, and the relationship between the scores (the reliability class) may be an indication of how certain the prediction is. The reliability class (RC) ranges from 1 to 5, where 1 indicates the strongest prediction. TargetP is maintained at the server of the Technical University of Denmark.

[0729] For the sequences predicted to contain an N-terminal presequence a potential cleavage site can also be predicted.

[0730] A number of parameters were selected, such as organism group (non-plant or plant), cutoff sets (none, predefined set of cutoffs, or user-specified set of cutoffs), and the calculation of prediction of cleavage sites (yes or no).

[0731] The results of TargetP 1.1 analysis of the polypeptide sequence as represented by SEQ ID NO: 2 are presented Table D1. The “plant” organism group has been selected, no cutoffs defined, and the predicted length of the transit peptide requested. The subcellular localization of the polypeptide sequence as represented by SEQ ID NO: 2 may be the cytoplasm or nucleus, no transit peptide is predicted.

TABLE D1
TargetP 1.1 analysis of the polypeptide
sequence as represented by SEQ ID NO: 2.

| Name | Len | cTP | mTP | SP | other | Loc | RC | TPlen |
|---|---|---|---|---|---|---|---|---|
| SEQ ID NO: 2 | 371 | 0.312 | 0.057 | 0.047 | 0.822 | — | 3 | — |
| cutoff | | 0.000 | 0.000 | 0.000 | 0.000 | | | |

Abbreviations: Len, Length; cTP, Chloroplastic transit peptide; mTP, Mitochondrial transit peptide, SP, Secretory pathway signal peptide, other, Other subcellular targeting, Loc, Predicted Location; RC, Reliability class; TPlen, Predicted transit peptide length.

[0732] Many other algorithms can be used to perform such analyses, including:
[0733] ChloroP 1.1 hosted on the server of the Technical University of Denmark;
[0734] Protein Prowler Subcellular Localisation Predictor version 1.2 hosted on the server of the Institute for Molecular Bioscience, University of Queensland, Brisbane, Australia;
[0735] PENCE Proteome Analyst PA-GOSUB 2.5 hosted on the server of the University of Alberta, Edmonton, Alberta, Canada;
[0736] TMHMM, hosted on the server of the Technical University of Denmark
[0737] PSORT (URL: psort.org)
[0738] PLOC (Park and Kanehisa, Bioinformatics, 19, 1656-1663 2003).

### 5.2. YRP5 Polypeptides

[0739] TargetP 1.1 predicts the subcellular location of eukaryotic proteins. The location assignment is based on the predicted presence of any of the N-terminal pre-sequences: chloroplast transit peptide (cTP), mitochondrial targeting peptide (mTP) or secretory pathway signal peptide (SP). Scores on which the final prediction is based are not really probabilities, and they do not necessarily add to one. However, the location with the highest score is the most likely according to TargetP, and the relationship between the scores (the reliability class) may be an indication of how certain the prediction is. The reliability class (RC) ranges from 1 to 5, where 1 indicates the strongest prediction. TargetP is maintained at the server of the Technical University of Denmark. For the sequences predicted to contain an N-terminal presequence a potential cleavage site can also be predicted.

[0740] A number of parameters are selected, such as organism group (non-plant or plant), cutoff sets (none, predefined set of cutoffs, or user-specified set of cutoffs), and the calculation of prediction of cleavage sites (yes or no).

[0741] Many other algorithms can be used to perform such analyses, including:
[0742] ChloroP 1.1 hosted on the server of the Technical University of Denmark;
[0743] Protein Prowler Subcellular Localisation Predictor version 1.2 hosted on the server of the Institute for Molecular Bioscience, University of Queensland, Brisbane, Australia;
[0744] PENCE Proteome Analyst PA-GOSUB 2.5 hosted on the server of the University of Alberta, Edmonton, Alberta, Canada;
[0745] TMHMM, hosted on the server of the Technical University of Denmark
[0746] PSORT (URL: psort.org)
[0747] PLOC (Park and Kanehisa, Bioinformatics, 19, 1656-1663, 2003).

### 5.3. Casein Kinase Type I (CK1) Polypeptides

[0748] TargetP 1.1 predicts the subcellular location of eukaryotic proteins. The location assignment is based on the predicted presence of any of the N-terminal pre-sequences: chloroplast transit peptide (cTP), mitochondrial targeting peptide (mTP) or secretory pathway signal peptide (SP). Scores on which the final prediction is based are not really probabilities, and they do not necessarily add to one. However, the location with the highest score is the most likely according to TargetP, and the relationship between the scores (the reliability class) may be an indication of how certain the prediction is. The reliability class (RC) ranges from 1 to 5, where 1 indicates the strongest prediction. TargetP is maintained at the server of the Technical University of Denmark.

[0749] For the sequences predicted to contain an N-terminal presequence a potential cleavage site can also be predicted.

[0750] A number of parameters are selected, such as organism group (non-plant or plant), cutoff sets (none, predefined set of cutoffs, or user-specified set of cutoffs), and the calculation of prediction of cleavage sites (yes or no).

[0751] Many other algorithms can be used to perform such analyses, including:
[0752] ChloroP 1.1 hosted on the server of the Technical University of Denmark;
[0753] Protein Prowler Subcellular Localisation Predictor version 1.2 hosted on the server of the Institute for Molecular Bioscience, University of Queensland, Brisbane, Australia;
[0754] PENCE Proteome Analyst PA-GOSUB 2.5 hosted on the server of the University of Alberta, Edmonton, Alberta, Canada;
[0755] TMHMM, hosted on the server of the Technical University of Denmark
[0756] PSORT (URL: psort.org)
[0757] PLOC (Park and Kanehisa, Bioinformatics, 19, 1656-1663, 2003).
   5.4. Basic Helix Loop Helix Group 12 (bHLH12-Like) Polypeptides

[0758] TargetP 1.1 predicts the subcellular location of eukaryotic proteins. The location assignment is based on the predicted presence of any of the N-terminal pre-sequences: chloroplast transit peptide (cTP), mitochondrial targeting peptide (mTP) or secretory pathway signal peptide (SP). Scores on which the final prediction is based are not really probabilities, and they do not necessarily add to one. However, the location with the highest score is the most likely according to TargetP, and the relationship between the scores (the reliability class) may be an indication of how certain the prediction is. The reliability class (RC) ranges from 1 to 5, where 1 indicates the strongest prediction. TargetP is maintained at the server of the Technical University of Denmark.

[0759] For the sequences predicted to contain an N-terminal presequence a potential cleavage site can also be predicted.

[0760] A number of parameters are selected, such as organism group (non-plant or plant), cutoff sets (none, predefined set of cutoffs, or user-specified set of cutoffs), and the calculation of prediction of cleavage sites (yes or no).

[0761] Many other algorithms can be used to perform such analyses, including:
[0762] ChloroP 1.1 hosted on the server of the Technical University of Denmark;
[0763] Protein Prowler Subcellular Localisation Predictor version 1.2 hosted on the server of the Institute for Molecular Bioscience, University of Queensland, Brisbane, Australia;
[0764] PENCE Proteome Analyst PA-GOSUB 2.5 hosted on the server of the University of Alberta, Edmonton, Alberta, Canada;
[0765] TMHMM, hosted on the server of the Technical University of Denmark
[0766] PSORT (URL: psort.org)
[0767] PLOC (Park and Kanehisa, Bioinformatics, 19, 1656-1663, 2003).

### 5.5. Alcohol Dehydrogenase (ADH2) Polypeptides

[0768] TargetP 1.1 predicts the subcellular location of eukaryotic proteins. The location assignment is based on the predicted presence of any of the N-terminal pre-sequences: chloroplast transit peptide (cTP), mitochondrial targeting peptide (mTP) or secretory pathway signal peptide (SP). Scores on which the final prediction is based are not really probabilities, and they do not necessarily add to one. However, the location with the highest score is the most likely according to TargetP, and the relationship between the scores (the reliability class) may be an indication of how certain the prediction is. The reliability class (RC) ranges from 1 to 5, where 1 indicates the strongest prediction. TargetP is maintained at the server of the Technical University of Denmark.

[0769] For the sequences predicted to contain an N-terminal presequence a potential cleavage site can also be predicted.

[0770] A number of parameters are selected, such as organism group (non-plant or plant), cutoff sets (none, predefined set of cutoffs, or user-specified set of cutoffs), and the calculation of prediction of cleavage sites (yes or no).

[0771] Many other algorithms can be used to perform such analyses, including:
[0772] ChloroP 1.1 hosted on the server of the Technical University of Denmark;
[0773] Protein Prowler Subcellular Localisation Predictor version 1.2 hosted on the server of the Institute for Molecular Bioscience, University of Queensland, Brisbane, Australia;
[0774] PENCE Proteome Analyst PA-GOSUB 2.5 hosted on the server of the University of Alberta, Edmonton, Alberta, Canada;
[0775] TMHMM, hosted on the server of the Technical University of Denmark
[0776] PSORT (URL: psort.org)
[0777] PLOC (Park and Kanehisa, Bioinformatics, 19, 1656-1663, 2003).

### 5.6. GCN5-Like Polypeptides

[0778] TargetP 1.1 predicts the subcellular location of eukaryotic proteins. The location assignment is based on the predicted presence of any of the N-terminal pre-sequences: chloroplast transit peptide (cTP), mitochondrial targeting peptide (mTP) or secretory pathway signal peptide (SP). Scores on which the final prediction is based are not really probabilities, and they do not necessarily add to one. However, the location with the highest score is the most likely according to TargetP, and the relationship between the scores (the reliability class) may be an indication of how certain the prediction is. The reliability class (RC) ranges from 1 to 5, where 1 indicates the strongest prediction. TargetP is maintained at the server of the Technical University of Denmark.

[0779] For the sequences predicted to contain an N-terminal presequence a potential cleavage site can also be predicted.

[0780] A number of parameters are selected, such as organism group (non-plant or plant), cutoff sets (none, predefined set of cutoffs, or user-specified set of cutoffs), and the calculation of prediction of cleavage sites (yes or no).

[0781] Many other algorithms can be used to perform such analyses, including:
[0782] ChloroP 1.1 hosted on the server of the Technical University of Denmark;
[0783] Protein Prowler Subcellular Localisation Predictor version 1.2 hosted on the server of the Institute for Molecular Bioscience, University of Queensland, Brisbane, Australia;
[0784] PENCE Proteome Analyst PA-GOSUB 2.5 hosted on the server of the University of Alberta, Edmonton, Alberta, Canada;
[0785] TMHMM, hosted on the server of the Technical University of Denmark
[0786] PSORT (URL: psort.org)
[0787] PLOC (Park and Kanehisa, Bioinformatics, 19, 1656-1663, 2003).

### Example 6

### Assay Related to the Polypeptide Sequences Useful in Performing the Methods of the Invention

### 6.1. Leucoanthocyanidin Dioxygenase (LDOX) Polypeptides

[0788] LDOX activity can be measured either by immunoassay or quantification of products of enzymatic reactions by chromatographic and metabolomic technologies, as described by Pelletier et al. (1999). An enzymatic assay is described in Saito et al. (Plant J. 17, 181-189, 1999). His-tagged or MBP-tagged LDOX proteins are produced and purified according to standard procedures. Assay of LDOX enzymatic activity, in brief:

[0789] Formation of anthocyanidin: 100 μl reaction mixture containing 20 mM K-Pi (pH 7.0), 200 mM NaCl, 10 mM maltose, 5 mM DTT, 4 mM sodium ascorbate, 1 mM 2-oxoglutaric acid, 0.4 mM FeSO₄, 1 mM leucoanthocyanidin and purified LDOX protein, are incubated at 30° C. for an appropriate period. The reaction is terminated by the addition of 1 μl of 36% HCl, next, the anthocyanidin formed (pelargonidin or cyanidin) is extracted with 100 μl of isoamyl alcohol for high performance liquid chromatography (HPLC) analysis. HPLC is carried out with an YMC-ODS-A312 column (0 6 mm×150 mm, YMC Co. Ltd., Kyoto, Japan) using a methanol/acetic acid/water mixture (20:15:65) as eluent at a flow rate of 1.0 ml min⁻¹ at 40° C. The quantities of pelargonidin and cyanidin, which elute respectively at 5.5 min and 4.3 min, are determined by their peak area upon monitoring the absorbance at 520 nm. The calibration curves of quantification were obtained with standardized materials of pelargonidin and cyanidin. Standardized materials of anthocyanidins are prepared by heat-treating leucopelargonidin and leucocyanidin at 95° C. in n-butanol containing 5% HCl for 10 min.

[0790] Liberation of ¹⁴CO₂:. The reaction mixture (100 μl) consists of 20 mM K-Pi (pH 7.0), 200 mM NaCl, 10 mM maltose, 5 mM DTT, 4 mM sodium ascorbate, 1 mM [1−¹⁴C] 2-oxoglutaric acid (1.85 GBq/mmol; 50 mCi mmol⁻¹) (Du Pont/NEN Research Products), 0.4 mM FeSO₄, 1 mM leucoanthocyanidin and purified LDOX protein. A paper filter (Whatman 3 mM, 1 cm×2 cm) soaked with 20 μl of Soluene-350 (0.5 M quaternary ammonium hydroxide/toluene, Packard) is placed on top of the microtube containing the reaction mixture for trapping the liberated ¹⁴CO₂. After incubation at 30° C., the reaction is stopped by addition of 1 μl of 36% HCl and the reaction mixture is kept for an additional 30 min to allow CO₂ generation to go to completion. The quantity of ¹⁴C on the filter paper is determined by liquid scintillation counting.

### 6.2. Alcohol Dehydrogenase (ADH2) Polypeptides

[0791] S-nitrosoglutathione reductase (GSNOR) activity as described in Rusterucci et al: Plant Physiol. 2007 March; 143(3): 1282-1292.

### Example 7

### Cloning of the Nucleic Acid Sequence Used in the Methods of the Invention

### 7.1. Leucoanthocyanidin Dioxygenase (LDOX) Polypeptides

[0792] The nucleic acid sequence used in the methods of the invention was amplified by PCR using as template a custom-made Arabidopsis thaliana seedlings cDNA library (in pCMV Sport 6.0; Invitrogen, Paisley, UK). PCR was performed using Hifi Taq DNA polymerase in standard conditions, using 200 ng of template in a 50 μl PCR mix. The primers used were prm04344 (SEQ ID NO: 182; sense, start codon in bold): 5′-ggggacaagtttgtacaaaaaagcagg cttcacaatgaacaagaacaagattgat-3′ and prm04345 (SEQ ID NO: 183; reverse, complementary): 5′-ggggaccactttgtacaagaaagctgggtctttaagggaagaaataaaa g-3′, which include the AttB sites for Gateway recombination. The amplified PCR fragment was purified also using standard methods. The first step of the Gateway procedure, the BP reaction, was then performed, during which the PCR fragment recombined in vivo with the pDONR201 plasmid to produce, according to the Gateway terminology, an “entry clone”, pLDOX. Plasmid pDONR201 was purchased from Invitrogen, as part of the Gateway® technology.

[0793] The entry clone comprising SEQ ID NO: 1 was then used in an LR reaction with a destination vector used for Oryza sativa transformation. This vector contained as functional elements within the T-DNA borders: a plant selectable marker; a screenable marker expression cassette; and a Gateway cassette intended for LR in vivo recombination with the nucleic acid sequence of interest already cloned in the entry clone. A rice GOS2 promoter (SEQ ID NO: 184) for constitutive specific expression was located upstream of this Gateway cassette.

[0794] After the LR recombination step, the resulting expression vector pGOS2::LDOX (FIG. 4) was transformed into Agrobacterium strain LBA4044 according to methods well known in the art.

### 7.2. YRP5 Polypeptides

[0795] The nucleic acid sequence is amplified by PCR using as template a cDNA library (in pCMV Sport 6.0; Invitrogen, Paisley, UK). PCR is performed using Hifi Taq DNA polymerase in standard conditions, using 200 ng of template in a 50 μl PCR mix. The primers include the AttB sites for Gateway recombination. The amplified PCR fragment is purified also using standard methods. The first step of the Gateway procedure, the BP reaction, is then performed, during which the PCR fragment recombines in vivo with the pDONR201 plasmid to produce, according to the Gateway terminology, an “entry clone”. Plasmid pDONR201 is purchased from Invitrogen, as part of the Gateway® technology.

[0796] The entry clone comprising SEQ ID NO: 185 or SEQ ID NO: 187 is then used in an LR reaction with a destination vector used for Oryza sativa transformation. This vector contains as functional elements within the T-DNA borders: a plant selectable marker; a screenable marker expression cassette; and a Gateway cassette intended for LR in vivo recombination with the nucleic acid sequence of interest already cloned in the entry clone.

[0797] A rice GOS2 promoter (SEQ ID NO: 191) for constitutive expression is located upstream of this Gateway cassette.

[0798] After the LR recombination step, the resulting expression vector pGOS2::YRP5 (FIG. 6) is transformed into Agrobacterium strain LBA4044 according to methods well known in the art.

### 7.3. Casein Kinase Type I (CK1) Polypeptides

[0799] The nucleic acid sequence used in the methods of the invention was amplified by PCR using as template a custom-made Arabidopsis thaliana seedlings cDNA library (in pCMV Sport 6.0; Invitrogen, Paisley, UK). PCR was performed using Hifi Tag DNA polymerase in standard conditions, using 200 ng of template in a 50 μl PCR mix. The primers used were: prm (fwd) 5′ ggggacaagtttgtacaaaaaagcaggcttaaacaatggatcgtgtggttggtg 3′ (SEQ ID NO: 270) and prm (rev) 5′ ggggaccactttgtacaagaaagctgggttaaagccaagcctctcacttc 3′ (SEQ ID NO: 271) which include the AttB sites for Gateway recombination. The amplified PCR fragment was purified also using standard methods. The first step of the Gateway procedure, the BP reaction, was then performed, during which the PCR fragment recombined in vivo with the pDONR201 plasmid to produce, according to the Gateway terminology, an “entry clone”, pCK1. Plasmid pDONR201 was purchased from Invitrogen, as part of the Gateway® technology.

[0800] The entry clone comprising SEQ ID NO: 194 was then used in an LR reaction with a destination vector used for Oryza sativa transformation. This vector contained as functional elements within the T-DNA borders: a plant selectable marker; a screenable marker expression cassette; and a Gateway cassette intended for LR in vivo recombination with the nucleic acid sequence of interest already cloned in the entry clone. A rice GOS2 promoter (SEQ ID NO: 272) for constitutive specific expression was located upstream of this Gateway cassette.

[0801] After the LR recombination step, the resulting expression vector pGOS2::CK1 (FIG. 8) was transformed into Agrobacterium strain LBA4044 according to methods well known in the art.

7.4. Basic Helix Loop Helix Group 12 (bHLH12-Like) Polypeptides

[0802] The nucleic acid sequence used in the methods of the invention was amplified by PCR using as template a custom-made Populus trichocarpa seedlings cDNA library (in pCMV Sport 6.0; Invitrogen, Paisley, UK). PCR was performed using Hifi Taq DNA polymerase in standard conditions, using 200 ng of template in a 50 μl PCR mix. The primers used were: prm (fwd) 5′-ggggacaagtttgtacaaaaaagcaggcttaaacaatggaaagagataagttgtttg-3′ (SEQ ID NO: 409) and prm (rev) 5′-ggggaccactttgtacaagaaagctgggtagggactgtttattggttaat-3′ (SEQ ID NO: 410) which include the AttB sites for Gateway recombination. The amplified PCR fragment was purified also using standard methods. The first step of the Gateway procedure, the BP reaction, was then performed, during which the PCR fragment recombined in vivo with the pDONR201 plasmid to produce, according to the Gateway terminology, an “entry clone”, pbHLH12-like. Plasmid pDONR201 was purchased from Invitrogen, as part of the Gateway® technology.

[0803] The entry clone comprising SEQ ID NO: 279 was then used in an LR reaction with a destination vector used for Oryza sativa transformation. This vector contained as functional elements within the T-DNA borders: a plant selectable marker; a screenable marker expression cassette; and a Gateway cassette intended for LR in vivo recombination with the nucleic acid sequence of interest already cloned in the entry clone. A rice GOS2 promoter (SEQ ID NO: 411) for constitutive specific expression was located upstream of this Gateway cassette.

[0804] After the LR recombination step, the resulting expression vector pGOS2::bHLH12-like (FIG. 10) was transformed into Agrobacterium strain LBA4044 according to methods well known in the art.

### 7.5. Alcohol Dehydrogenase (ADH2) Polypeptides

[0805] The nucleic acid sequence used in the methods of the invention was amplified by PCR using a Saccharum cDNA library (in pCMV Sport 6.0; Invitrogen, Paisley, UK). PCR was performed using Hifi Taq DNA polymerase in standard conditions, using 200 ng of template in a 50 μl PCR mix. The primers used were prm08126 (SEQ ID NO: 457; sense, start codon in bold): 5′-ggggacaagtttgtacaaaaaagcaggcttaaacaatggcttcccccacc-3′ and prm08127 (SEQ ID NO: 458; reverse, complementary): 5′-ggggaccactttgtacaagaaagctgggtgacatatatgcaaacg gctt-3′, which include the AttB sites for Gateway recombination. The amplified PCR fragment was purified also using standard methods. The first step of the Gateway procedure, the BP reaction, was then performed, during which the PCR fragment recombined in vivo with the pDONR201 plasmid to produce, according to the Gateway terminology, an “entry clone”, pADH2. Plasmid pDONR201 was purchased from Invitrogen, as part of the Gateway® technology.

[0806] The entry clone comprising SEQ ID NO: 412 was then used in an LR reaction with a destination vector used for Oryza sativa transformation. This vector contained as functional elements within the T-DNA borders: a plant selectable marker; a screenable marker expression cassette; and a Gateway cassette intended for LR in vivo recombination with the nucleic acid sequence of interest already cloned in the entry clone. A rice putative proteinase inhibitor promoter (SEQ ID NO: 456) for seed-specific expression was located upstream of this Gateway cassette.

[0807] After the LR recombination step, the resulting expression vector pProteinase inhibitor::ADH2 (FIG. 13) was transformed into Agrobacterium strain LBA4044 according to methods well known in the art.

### 7.6. GCN5-Like Polypeptides

[0808] The nucleic acid sequence used in the methods of the invention was amplified by PCR using as template a custom-made Oryza sativa seedlings cDNA library (in pCMV Sport 6.0; Invitrogen, Paisley, UK). PCR was performed using Hifi Taq DNA polymerase in standard conditions, using 200 ng of template in a 50 μl PCR mix. The primers used were prm 10643 (SEQ ID NO: 515; sense, start codon in bold): 5′-ggggacaagtttgtacaaaaaagcaggcttaaa caatggacggcctcgcgg-3′ and prm 10644 (SEQ ID NO: 516; reverse, complementary): 5′-gggg accactttgtacaagaaagctgggtaagtgactacccaatgcgccc-3′, which include the AttB sites for Gateway recombination. The amplified PCR fragment was purified also using standard methods. The first step of the Gateway procedure, the BP reaction, was then performed, during which the PCR fragment recombined in vivo with the pDONR201 plasmid to produce, according to the Gateway terminology, an “entry clone”, pGCN5. Plasmid pDONR201 was purchased from Invitrogen, as part of the Gateway® technology.

[0809] The entry clone comprising SEQ ID NO: 459 was then used in an LR reaction with a destination vector used for Oryza sativa transformation. This vector contained as functional elements within the T-DNA borders: a plant selectable marker; a screenable marker expression cassette; and a Gateway cassette intended for LR in vivo recombination with the nucleic acid sequence of interest already cloned in the entry clone. A rice GOS2 promoter (SEQ ID NO: 513) for constitutive specific expression was located upstream of this Gateway cassette.

[0810] After the LR recombination step, the resulting expression vector pGOS2:: GCN5 (FIG. 16) was transformed into Agrobacterium strain LBA4044 according to methods well known in the art.

[0811] In the same way SEQ ID NO: 475 was cloned from a Populus trichocarpa cDNA library, using primers prm12019: ggggacaagtttgtacaaaaaagcaggcttaaacaatggacactcactctcactta (forward primer) and prm12020: ggggaccactttgtacaagaaagctgggtaatattgatctcctaagaactg (reverse primer) and introduced into Agrobacterium LBA4044 for rice transformation.

### Example 8

### Plant Transformation

### Rice Transformation

[0812] The Agrobacterium containing the expression vector was used to transform Oryza sativa plants. Mature dry seeds of the rice japonica cultivar Nipponbare were dehusked. Sterilization was carried out by incubating for one minute in 70% ethanol, followed by 30 minutes in 0.2% HgCl₂, followed by a 6 times 15 minutes wash with sterile distilled water. The sterile seeds were then germinated on a medium containing 2,4-D (callus induction medium). After incubation in the dark for four weeks, embryogenic, scutellum-derived calli were excised and propagated on the same medium. After two weeks, the calli were multiplied or propagated by subculture on the same medium for another 2 weeks. Embryogenic callus pieces were sub-cultured on fresh medium 3 days before co-cultivation (to boost cell division activity).

[0813] Agrobacterium strain LBA4404 containing the expression vector was used for co-cultivation. Agrobacterium was inoculated on AB medium with the appropriate antibiotics and cultured for 3 days at 28° C. The bacteria were then collected and suspended in liquid co-cultivation medium to a density (OD₆₀₀) of about 1. The suspension was then transferred to a Petri dish and the calli immersed in the suspension for 15 minutes. The callus tissues were then blotted dry on a filter paper and transferred to solidified, co-cultivation medium and incubated for 3 days in the dark at 25° C. Co-cultivated calli were grown on 2,4-D-containing medium for 4 weeks in the dark at 28° C. in the presence of a selection agent. During this period, rapidly growing resistant callus islands developed. After transfer of this material to a regeneration medium and incubation in the light, the embryogenic potential was released and shoots developed in the next four to five weeks. Shoots were excised from the calli and incubated for 2 to 3 weeks on an auxin-containing medium from which they were transferred to soil. Hardened shoots were grown under high humidity and short days in a greenhouse.

[0814] Approximately 35 independent TO rice transformants were generated for one construct. The primary transformants were transferred from a tissue culture chamber to a greenhouse. After a quantitative PCR analysis to verify copy number of the T-DNA insert, only single copy transgenic plants that exhibit tolerance to the selection agent were kept for harvest of T1 seed. Seeds were then harvested three to five months after transplanting. The method yielded single locus transformants at a rate of over 50% (Aldemita and Hodges1996, Chan et al. 1993, Hiei et al. 1994).

### Example 9

### Transformation of Other Crops

### Corn Transformation

[0815] Transformation of maize (Zea mays) is performed with a modification of the method described by lshida et al. (1996) Nature Biotech 14(6): 745-50. Transformation is genotype-dependent in corn and only specific genotypes are amenable to transformation and regeneration. The inbred line A188 (University of Minnesota) or hybrids with A188 as a parent are good sources of donor material for transformation, but other genotypes can be used successfully as well. Ears are harvested from corn plant approximately 11 days after pollination (DAP) when the length of the immature embryo is about 1 to 1.2 mm. Immature embryos are cocultivated with Agrobacterium tumefaciens containing the expression vector, and transgenic plants are recovered through organogenesis. Excised embryos are grown on callus induction medium, then maize regeneration medium, containing the selection agent (for example imidazolinone but various selection markers can be used). The Petri plates are incubated in the light at 25° C. for 2-3 weeks, or until shoots develop. The green shoots are transferred from each embryo to maize rooting medium and incubated at 25° C. for 2-3 weeks, until roots develop. The rooted shoots are transplanted to soil in the greenhouse. T1 seeds are produced from plants that exhibit tolerance to the selection agent and that contain a single copy of the T-DNA insert.

### Wheat Transformation

[0816] Transformation of wheat is performed with the method described by Ishida et al. (1996) Nature Biotech 14(6): 745-50. The cultivar Bobwhite (available from CIMMYT, Mexico) is commonly used in transformation. Immature embryos are co-cultivated with Agrobacterium tumefaciens containing the expression vector, and transgenic plants are recovered through organogenesis. After incubation with Agrobacterium, the embryos are grown in vitro on callus induction medium, then regeneration medium, containing the selection agent (for example imidazolinone but various selection markers can be used). The Petri plates are incubated in the light at 25° C. for 2-3 weeks, or until shoots develop. The green shoots are transferred from each embryo to rooting medium and incubated at 25° C. for 2-3 weeks, until roots develop. The rooted shoots are transplanted to soil in the greenhouse. T1 seeds are produced from plants that exhibit tolerance to the selection agent and that contain a single copy of the T-DNA insert.

### Soybean Transformation

[0817] Soybean is transformed according to a modification of the method described in the Texas A&M U.S. Pat. No. 5,164,310. Several commercial soybean varieties are amenable to transformation by this method. The cultivar Jack (available from the Illinois Seed foundation) is commonly used for transformation. Soybean seeds are sterilised for in vitro sowing. The hypocotyl, the radicle and one cotyledon are excised from seven-day old young seedlings. The epicotyl and the remaining cotyledon are further grown to develop axillary nodes. These axillary nodes are excised and incubated with Agrobacterium tumefaciens containing the expression vector. After the cocultivation treatment, the explants are washed and transferred to selection media. Regenerated shoots are excised and placed on a shoot elongation medium. Shoots no longer than 1 cm are placed on rooting medium until roots develop. The rooted shoots are transplanted to soil in the greenhouse. T1 seeds are produced from plants that exhibit tolerance to the selection agent and that contain a single copy of the T-DNA insert.

[0818] Rapeseed/canola transformation

[0819] Cotyledonary petioles and hypocotyls of 5-6 day old young seedling are used as explants for tissue culture and transformed according to Babic et al. (1998, Plant Cell Rep 17: 183-188). The commercial cultivar Westar (Agriculture Canada) is the standard variety used for transformation, but other varieties can also be used. Canola seeds are surface-sterilized for in vitro sowing. The cotyledon petiole explants with the cotyledon attached are excised from the in vitro seedlings, and inoculated with Agrobacterium (containing the expression vector) by dipping the cut end of the petiole explant into the bacterial suspension. The explants are then cultured for 2 days on MSBAP-3 medium containing 3 mg/l BAP, 3% sucrose, 0.7° A Phytagar at 23° C., 16 hr light. After two days of co-cultivation with Agrobacterium, the petiole explants are transferred to MSBAP-3 medium containing 3 mg/l BAP, cefotaxime, carbenicillin, or timentin (300 mg/l) for 7 days, and then cultured on MSBAP-3 medium with cefotaxime, carbenicillin, or timentin and selection agent until shoot regeneration. When the shoots are 5-10 mm in length, they are cut and transferred to shoot elongation medium (MSBAP-0.5, containing 0.5 mg/l BAP). Shoots of about 2 cm in length are transferred to the rooting medium (MS0) for root induction. The rooted shoots are transplanted to soil in the greenhouse. T1 seeds are produced from plants that exhibit tolerance to the selection agent and that contain a single copy of the T-DNA insert.

### Alfalfa Transformation

[0820] A regenerating clone of alfalfa (Medicago sativa) is transformed using the method of (McKersie et al., 1999 Plant Physiol 119: 839-847). Regeneration and transformation of alfalfa is genotype dependent and therefore a regenerating plant is required. Methods to obtain regenerating plants have been described. For example, these can be selected from the cultivar Rangelander (Agriculture Canada) or any other commercial alfalfa variety as described by Brown DCW and A Atanassov (1985. Plant Cell Tissue Organ Culture 4: 111-112). Alternatively, the RA3 variety (University of Wisconsin) has been selected for use in tissue culture (Walker et al., 1978 Am J Bot 65:654-659). Petiole explants are cocultivated with an overnight culture of Agrobacterium tumefaciens C58C1 pMP90 (McKersie et al., 1999 Plant Physiol 119: 839-847) or LBA4404 containing the expression vector. The explants are cocultivated for 3 d in the dark on SH induction medium containing 288 mg/L Pro, 53 mg/L thioproline, 4.35 g/L K2SO4, and 100 μm acetosyringinone. The explants are washed in half-strength Murashige-Skoog medium (Murashige and Skoog, 1962) and plated on the same SH induction medium without acetosyringinone but with a suitable selection agent and suitable antibiotic to inhibit Agrobacterium growth. After several weeks, somatic embryos are transferred to BOi2Y development medium containing no growth regulators, no antibiotics, and 50 g/L sucrose. Somatic embryos are subsequently germinated on half-strength Murashige-Skoog medium. Rooted seedlings were transplanted into pots and grown in a greenhouse. T1 seeds are produced from plants that exhibit tolerance to the selection agent and that contain a single copy of the T-DNA insert.

### Cotton Transformation

[0821] Cotton is transformed using Agrobacterium tumefaciens according to the method described in U.S. Pat. No. 5,159,135. Cotton seeds are surface sterilised in 3% sodium hypochlorite solution during 20 minutes and washed in distilled water with 500 μg/ml cefotaxime. The seeds are then transferred to SH-medium with 50 μg/ml benomyl for germination. Hypocotyls of 4 to 6 days old seedlings are removed, cut into 0.5 cm pieces and are placed on 0.8% agar. An Agrobacterium suspension (approx. 108 cells per ml, diluted from an overnight culture transformed with the gene of interest and suitable selection markers) is used for inoculation of the hypocotyl explants. After 3 days at room temperature and lighting, the tissues are transferred to a solid medium (1.6 g/l Gelrite) with Murashige and Skoog salts with B5 vitamins (Gamborg et al., Exp. Cell Res. 50:151-158 (1968)), 0.1 mg/l 2,4-D, 0.1 mg/l 6-furfurylaminopurine and 750 μg/ml MgCL2, and with 50 to 100 μg/ml cefotaxime and 400-500 μg/ml carbenicillin to kill residual bacteria. Individual cell lines are isolated after two to three months (with subcultures every four to six weeks) and are further cultivated on selective medium for tissue amplification (30° C., 16 hr photoperiod). Transformed tissues are subsequently further cultivated on non-selective medium during 2 to 3 months to give rise to somatic embryos. Healthy looking embryos of at least 4 mm length are transferred to tubes with SH medium in fine vermiculite, supplemented with 0.1 mg/l indole acetic acid, 6 furfurylaminopurine and gibberellic acid. The embryos are cultivated at 30° C. with a photoperiod of 16 hrs, and plantlets at the 2 to 3 leaf stage are transferred to pots with vermiculite and nutrients. The plants are hardened and subsequently moved to the greenhouse for further cultivation.

### Example 10

### Phenotypic Evaluation Procedure

### 10.1 Evaluation Setup

[0822] Approximately 35 independent TO rice transformants were generated. The primary transformants were transferred from a tissue culture chamber to a greenhouse for growing and harvest of T1 seed. Six events, of which the T1 progeny segregated 3:1 for presence/absence of the transgene, were retained. For each of these events, approximately 10 T1 seedlings containing the transgene (hetero- and homo-zygotes) and approximately 10 T1 seedlings lacking the transgene (nullizygotes) were selected by monitoring visual marker expression. The transgenic plants and the corresponding nullizygotes were grown side-by-side at random positions. Greenhouse conditions were of shorts days (12 hours light), 28° C. in the light and 22° C. in the dark, and a relative humidity of 70%. Plants grown under non-stress conditions are watered at regular intervals to ensure that water and nutrients are not limiting and to satisfy plant needs to complete growth and development.

[0823] T1 events were further evaluated in the T2 generation following the same evaluation procedure as for the T1 generation but with more individuals per event. From the stage of sowing until the stage of maturity the plants were passed several times through a digital imaging cabinet. At each time point digital images (2048×1536 pixels, 16 million colours) were taken of each plant from at least 6 different angles.

### Drought Screen

[0824] Plants from T2 seeds are grown in potting soil under normal conditions until they approached the heading stage. They are then transferred to a “dry” section where irrigation is withheld. Humidity probes are inserted in randomly chosen pots to monitor the soil water content (SWC). When SWC goes below certain thresholds, the plants are automatically re-watered continuously until a normal level is reached again. The plants are then re-transferred again to normal conditions. The rest of the cultivation (plant maturation, seed harvest) is the same as for plants not grown under abiotic stress conditions. Growth and yield parameters are recorded as detailed for growth under normal conditions.

[0825] Nitrogen use efficiency screen

[0826] Rice plants from T2 seeds were grown in potting soil under normal conditions except for the nutrient solution. The pots were watered from transplantation to maturation with a specific nutrient solution containing reduced N nitrogen (N) content, usually between 7 to 8 times less. The rest of the cultivation (plant maturation, seed harvest) was the same as for plants not grown under abiotic stress. Growth and yield parameters were recorded as detailed for growth under normal conditions.

### Salt Stress Screen

[0827] Plants are grown on a substrate made of coco fibers and argex (3 to 1 ratio). A normal nutrient solution is used during the first two weeks after transplanting the plantlets in the greenhouse. After the first two weeks, 25 mM of salt (NaCl) is added to the nutrient solution, until the plants are harvested. Seed-related parameters are then measured.

[0828] 10.2 Statistical analysis: F test

[0829] A two factor ANOVA (analysis of variants) was used as a statistical model for the overall evaluation of plant phenotypic characteristics. An F test was carried out on all the parameters measured of all the plants of all the events transformed with the gene of the present invention. The F test was carried out to check for an effect of the gene over all the transformation events and to verify for an overall effect of the gene, also known as a global gene effect. The threshold for significance for a true global gene effect was set at a 5% probability level for the F test. A significant F test value points to a gene effect, meaning that it is not only the mere presence or position of the gene that is causing the differences in phenotype.

[0830] Where two experiments with overlapping events were carried out, a combined analysis was performed. This is useful to check consistency of the effects over the two experiments, and if this is the case, to accumulate evidence from both experiments in order to increase confidence in the conclusion. The method used was a mixed-model approach that takes into account the multilevel structure of the data (i.e. experiment-event-segregants). P values were obtained by comparing likelihood ratio test to chi square distributions.

### 10.3 Parameters Measured

[0831] Biomass-related parameter measurement

[0832] From the stage of sowing until the stage of maturity the plants were passed several times through a digital imaging cabinet. At each time point digital images (2048×1536 pixels, 16 million colours) were taken of each plant from at least 6 different angles.

[0833] The plant aboveground area (or leafy biomass) was determined by counting the total number of pixels on the digital images from aboveground plant parts discriminated from the background. This value was averaged for the pictures taken on the same time point from the different angles and was converted to a physical surface value expressed in square mm by calibration. Experiments show that the aboveground plant area measured this way correlates with the biomass of plant parts above ground. The above ground area is the area measured at the time point at which the plant had reached its maximal leafy biomass. The early vigour is the plant (seedling) aboveground area three weeks post-germination. Increase in root biomass is expressed as an increase in total root biomass (measured as maximum biomass of roots observed during the lifespan of a plant); or as an increase in the root/shoot index (measured as the ratio between root mass and shoot mass in the period of active growth of root and shoot).

[0834] Early vigour was determined by counting the total number of pixels from aboveground plant parts discriminated from the background. This value was averaged for the pictures taken on the same time point from different angles and was converted to a physical surface value expressed in square mm by calibration. The results described below are for plants three weeks post-germination.

[0835] Seed-related parameter measurements

[0836] The mature primary panicles were harvested, counted, bagged, barcode-labelled and then dried for three days in an oven at 37° C. The panicles were then threshed and all the seeds were collected and counted. The filled husks were separated from the empty ones using an air-blowing device. The empty husks were discarded and the remaining fraction was counted again. The filled husks were weighed on an analytical balance. The number of filled seeds was determined by counting the number of filled husks that remained after the separation step. The total seed yield was measured by weighing all filled husks harvested from a plant. Total seed number per plant was measured by counting the number of husks harvested from a plant. Thousand Kernel Weight (TKW) is extrapolated from the number of filled seeds counted and their total weight. The Harvest Index (HI) in the present invention is defined as the ratio between the total seed yield and the above ground area (mm²), multiplied by a factor 10⁶. The total number of flowers per panicle as defined in the present invention is the ratio between the total number of seeds and the number of mature primary panicles. The seed fill rate as defined in the present invention is the proportion (expressed as a %) of the number of filled seeds over the total number of seeds (or florets).

### Examples 11

### Results of the Phenotypic Evaluation of the Transgenic Plants

### 11.1. Leucoanthocyanidin Dioxygenase (LDOX) Polypeptides

[0837] Plants were evaluated in the T1 generation. The results of the evaluation of transgenic rice plants expressing an LDOX nucleic acid under nitrogen-limiting conditions are presented hereunder. An increase was observed for above-ground biomass (AreaMax), early vigour (EmerVigor), root biomass (RootMax and RootThickMax), total number of seeds, number of first panicles, and thousand-kernel weight (Table E1).

TABLE E1
Data summary for transgenic rice plants; for each parameter,
the overall percent increase is shown for the T1 generation,
for each parameter the p-value is <0.05.

| Parameter | Overall increase |
|---|---|
| AreaMax | 8.1 |
| EmerVigor | 11.6 |
| RootMax | 6.2 |
| nrtotalseed | 39.4 |
| TKW | 17.2 |
| firstpan | 80.6 |
| RootThickMax | 13.9 |

### 11.2. Casein Kinase Type I (CK1) Polypeptides

[0838] The results of the evaluation of transgenic rice plants in the T2 generation and expressing a nucleic acid comprising the longest Open Reading Frame in SEQ ID NO: 194 under the nitrogen limiting growth conditions described under the Nitrogen use efficiency screen above are presented below (Table E2). See previous Examples for details on the generations of the transgenic plants.

TABLE E2

| | % increased in transgenic plants |
|---|---|
| Yield trait | compared to control plants |
| TKW | 4% |
| GravityYMax | 8.2% |

[0839] The results of the evaluation of transgenic rice plants under Nitrogen use efficiency screen showed and increase for thousand kernel weight (TKW) and in the gravity center (GravityYMax), which correlate with increased in seed size and weight and a change in the shape of the canopy of the plant, such that the plant height and/or the leaf angle are altered in such a way that gravity center of the canopy is higher.

[0840] 11.3. Basic Helix Loop Helix group 12 (bHLH12-like) polypeptides Results of the phenotypic evaluation of the transgenic plants pGOS2::bHLH12-like (SEQ ID NO: 280)

[0841] The results of the evaluation of transgenic rice plants in the T2 generation and expressing a nucleic acid comprising the longest Open Reading Frame in SEQ ID NO: 279 under the nitrogen limiting growth conditions described under the Nitrogen use efficiency screen above are presented below (Table E3a). See previous Examples for details on the generations of the transgenic plants.

TABLE E3a

| | % increase in transgenic plants |
|---|---|
| Yield trait | compared to control plants |
| TKW | 4% |
| GravityYMax | 8.2% |

[0842] The results of the evaluation of transgenic rice plants under Nitrogen use efficiency screen Showed and increase for thousand kernel weight (TKW) and in the gravity center (GravityYMax), which correlate with increased in seed size and weight and a change in the shape of the canopy of the plant, such that the plant height and/or the leaf angle are altered in such a way that gravity center of the canopy is higher.

[0843] Phenotypic evaluation of the transgenic plants PGOS2::pGOS2::bHLH12-like (SEQ ID NO: 395)

[0844] Transgenic rice plants in the T1 generation are generated as described above by transformation of a genetic constructs comprising the GOS2 promoter operably lined to the longest Open Reading Frame in SEQ ID NO: 395 under the nitrogen limiting growth conditions described under the Nitrogen use efficiency screen above. The longest Open Reading Frame in SEQ ID NO: 395 is isolated by PCR according to the protocol of the Examples above using the primers given below:

fwd primer: ggggacaagtttgtacaaaaaagcaggcttaaacaatgaatgagaaggacgcca
rev primer: ggggaccactttgtacaagaaagctgggtcttgcttcagttgtggaatca

[0845] The results of the evaluation of transgenic rice plants under Nitrogen use efficiency screen show that the transgenic plants have increase yield-traits compared to control plants.

[0846] Phenotypic evaluation of the transgenic plants PGOS2::pGOS2::bHLH12-like (SEQ ID NO: 399)

[0847] Transgenic rice plants were generated as described above by transformation of a genetic construct comprising the GOS2 promoter operably linked to the longest Open Reading Frame in SEQ ID NO: 399, which was isolated by PCR according to the protocol of the Examples above using the primers given below:

fwd primer: ggggacaagtttgtacaaaaaagcaggcttaaacaatggcgaatctctcttctgat
rev primer: ggggaccactttgtacaagaaagctgggtaaaacaaaagtcaaagggtcc

[0848] The results of the evaluation of T1 generation transgenic rice plants grown under normal growth conditions show that the transgenic plants have increased yield-related traits compared to control plants; see Table E3b:

TABLE E3b

| | % increase compared to |
|---|---|
| Yield trait | control plants |
| totalwgseeds | 29.8 |
| fillrate | 30.7 |
| harvestindex | 26.7 |
| nrfilledseed | 27.4 |
| HeightMax | 5.1 |
| GravityYMax | 6.3 |

[0849] Phenotypic evaluation of the transgenic plants PGOS2::pGOS2::bHLH12-like (SEQ ID NO: 391)

[0850] Transgenic rice plants in the T1 generation were generated as described above by transformation of a genetic construct comprising the GOS2 promoter operably linked to the longest Open Reading Frame in SEQ ID NO: 391 under the nitrogen limiting growth conditions described under the Nitrogen use efficiency screen above. The longest Open Reading Frame in SEQ ID NO: 391 was isolated by PCR according to the protocol of the Examples above using the primers given below:

[0851] fwd primer: ggggacaagtttgtacaaaaaagcaggcttaaacaatgaatgagaaggacgcca rev primer: ggggaccactttgtacaagaaagctgggtcttgcttcagttgtggaatca

[0852] The results of the evaluation of transgenic rice plants under Nitrogen use efficiency screen show that the transgenic plants had increased yield-related traits compared to control plants, in particular an increase was observed for AreaMax (biomass, 3 positive lines with more than 5% increase), for TKW (2 positive lines with 5% or more increase), and for HeightMax (height of the plant, 2 positive lines with 5% or more increase).

### 11.4. Alcohol Dehydrogenase (ADH2) Polypeptides

[0853] The results of the evaluation of transgenic rice plants in the T2 generation and expressing a nucleic acid comprising the longest Open Reading Frame in SEQ ID NO: 412 under non-stress conditions are presented below. See previous Examples for details on the generations of the transgenic plants.

[0854] An increase of in the following parameters was observed compared to control plants: total seed weight, number of flowers per panicle, fill rate, root biomass, plant height and Thousand Kernel Weight (TKW).

### 11.5. GCN5-Like Polypeptides

[0855] The results of the evaluation of transgenic rice plants in the T2 generation and expressing a nucleic acid comprising the longest Open Reading Frame in SEQ ID NO: 459 under non-stress conditions are presented below.

[0856] The results of the evaluation of transgenic rice plants under non-stress conditions are presented below (Table E4). An increase of (at least—more than) 5% was observed for aboveground biomass (AreaMax), total seed yield (total weight of seeds), number of filled seeds, fill rate, number of flowers per panicle, harvest index, time to flower (TimetoFlower), Total number of seeds per plant (nrtotalseed), Center of gravity of the canopy (GravityYMax), proportion of the thick root in the root system (RootThickMax).

TABLE E4
Non-Stress conditions

| Parameter | Overall |
|---|---|
| AreaMax | 9.7 |
| TimetoFlower | 6.4 |
| totalwgseeds | 14.2 |
| nrtotalseed | 8.0 |
| fillrate | 5.0 |
| harvestindex | 5.3 |
| nrfilledseed | 12.7 |
| flowerperpan | 7.7 |
| GravityYMax | 5.6 |
| RootThickMax | 8.2 |

[0857] For each parameter, the percentage overall is shown if it reaches p<0:05 and above the 5% threshold.

[0858] Rice plants transformed with SEQ ID NO: 475 were grown under non-stress conditions and showed increased yield (increased seed yield as well as increased biomass, in particular increased root biomass), details are given in Table E5

TABLE E5
average increase in yield for the four best
lines out of a total of 6 tested lines:

| | Average % increase |
|---|---|
| Total seed yield | 12.8% |
| Total number of seeds | 12.8% |
| Number of flowers per panicle | 12.1% |
| Number of filled seeds | 16.2% |
| Root max | 11.4% |

The application's sequence listing, which the Patent Office published only in electronic form, follows.

SEQUENCE LISTING (518 sequences)

SEQ ID NO: 1 - DNA, 1116 bp, Arabidopsis thalliana
atgaacaagaacaagattgatgttaagatcgagacgaagaaaggatcgatggatgagtggcctgagccaatcgtccgagtccagtccttagccgagagcaacctctcctctctccccgaccgttacatcaaaccagcgtctctacgccccaccacgaccgaagacgctcctaccgcgaccaacatcccaatcatagaccttgaaggactcttctcggaagaagggttgtctgatgacgtcatcatggctcggatatcggaggcttgccgtgggtgggggttcttccaggtggtgaaccacggggtcaaaccggagctgatggacgcggctagggagaattggagagagtttttccatatgccggttaatgccaaagagacttactcaaactcaccaagaacctacgaaggctatggaagtagactaggtgttgagaaaggagcaagtcttgattggagtgattattactttctccatcttcttcctcatcatttgaaagacttcaacaagtggccttcttttcctcccaccataagagaagtgatcgatgaatacggcgaagagctagtgaagctaagtgggagaattatgagggtattatcgacaaacttgggactaaaagaggataagtttcaagaagcatttggaggtgaaaacattggggcgtgtttgagggttaattattacccaaaatgccctcgaccggagctggctcttggtctctctccacactccgatcctggcggtatgaccattctcttaccggacgatcaagtcttcggtctccaggttcgtaaagatgacacgtggatcaccgtcaagcctcatccccatgctttcatcgtcaatattggtgatcaaatacagatactaagcaactcaacatacaagagtgtggagcatagagtgatagtgaactcggacaaggagagagtttcacttgccttcttctacaatcctaaaagcgatattccgatccaaccattacaagaacttgtatcaactcataatcctcctttataccctcccatgacctttgatcagtatagactctttatcagaactcaaggtccacaaggcaaatcccatgttgaatctcatatttctcctcgttga

SEQ ID NO: 2 - protein, 371 aa, Arabidopsis thalliana
MNKNKIDVKIETKKGSMDEWPEPIVRVQSLAESNLSSLPDRYIKPASLRPTTTEDAPTATNIPIIDLEGLFSEEGLSDDVIMARISEACRGWGFFQVVNHGVKPELMDAARENWREFFHMPVNAKETYSNSPRTYEGYGSRLGVEKGASLDWSDYYFLHLLPHHLKDFNKWPSFPPTIREVIDEYGEELVKLSGRIMRVLSTNLGLKEDKFQEAFGGENIGACLRVNYYPKCPRPELALGLSPHSDPGGMTILLPDDQVFGLQVRKDDTWITVKPHPHAFIVNIGDQIQILSNSTYKSVEHRVIVNSDKERVSLAFFYNPKSDIPIQPLQELVSTHNPPLYPPMTFDQYRLFIRTQGPQGKSHVESHISPR

SEQ ID NO: 3 - DNA, 1065 bp, Gossypium hirsutum
atggtgacctcagtgctacctagagtagaaagcttggcaagcagtgggattcaatcaatcccgaaagaatatatcaggcctcaagaagagcttacaagcataggtaacgtgtttgaagaagagaaaaaagaggaagggcctcaggttccgaccatcgatttgacagaaatcgagtcggaggacaaagaggtccgggaaagatgtcagcaggagctgaaaaaggctgccatggaatggggtgtgatgcaccttgttaaccatggcatctccgaggagctcatggatcgtgttaggaaagttgggcagaaattctttgaactccctgtggaggagaaagagaagtatgccaacgaccagagctctgggaatgttcagggctatggtagcaagcttgctaataatgctagtgggcagcttgagtgggaggactacttcttccatctaatttttcctgaggataagagagacttgtcaatttggcctaaaatccccagcgagtacactgaagttacaagtgagtatgcaaggcaactgcgagccctagcgagcaaaatactttcagcactatcaatttgcttgggattagaagaaggaaggctagagaaggaagttggtggcgtggaagagcttcttcttcaattgaaaatcaattactaccccaagtgtccacaaccagaactcgctctcggtgtcgaagctcacaccgatataagtgcactcactttcattctccacaacatggttcctggcctccaactcttttaccagggcaagtgggtgaccgctaaatgtgttcccaactccatcatcatgcacattggagacaccatcgtgatcctcagcaatggaaagttcaagagcattctccccaggggtctggttaataaggagaaggttaggatttcatgggcagttttttgtgagccaccgaaggataagatcatccttaagccactcccggagactgtctttgagaccgaacctccactgttccctcctcgtacctttgctcagcatatcgagcataagctgttcaggaagacccaggataatctgtccaactga

SEQ ID NO: 4 - protein, 354 aa, Gossypium hirsutum
MVTSVLPRVESLASSGIQSIPKEYIRPQEELTSIGNVFEEEKKEEGPQVPTIDLTEIESEDKEVRERCQQELKKAAMEWGVMHLVNHGISEELMDRVRKVGQKFFELPVEEKEKYANDQSSGNVQGYGSKLANNASGQLEWEDYFFHLIFPEDKRDLSIWPKIPSEYTEVTSEYARQLRALASKILSALSICLGLEEGRLEKEVGGVEELLLQLKINYYPKCPQPELALGVEAHTDISALTFILHNMVPGLQLFYQGKWVTAKCVPNSIIMHIGDTIVILSNGKFKSILPRGLVNKEKVRISWAVFCEPPKDKIILKPLPETVFETEPPLFPPRTFAQHIEHKLFRKTQDNLSN

SEQ ID NO: 5 - DNA, 1068 bp, Hieracium pilosella
atggtgattgtaacaaacacaagagtcgaaagcttatcaaaaagcgggattcatgaaatcccaaaagaatacatccgaccacaagacgagctaccaacaatcaccaacatcttggacgaagtaagcaccgatcaagggccacaagtccccaccatcgacttaaacgacatcaactccgacgaccccaaaacccttgaaaactgtagaaacgagttcataaaagcagccaccgagtggggcgtcatgcacctcgtcaaccatggaatctccgacgacctcatcgctcgtgtcaaggctgccggcgagagtttctttggtcagcctatcgaggagaaggagaagcattctaacgatatcgcatcagggaagattcaagggtacggaagtaaattggctaacaatgcttccgggcagctcgaatgggaagactacttctttcacactgtgtttcccgaggataaacgtgatttgaccgtttggcccaccacgcccaccgattacataccagctaccgaagagtacgcaaagcaaatacgagcactcaccaccaagatcctctcggtgctatctctcgggttaggactagaggcggggcggctagaggaggaggttggcggcgcggatgagctactcctccaactaaaaatcaattattacccaaaatgccctcaacccgagctagcactcggtgtggaagctcacacggatttgtgtgcactcacgttcatactccacaacatggtccccgggctccaactcttctacaacgatcaatgggtcactgcaaaatgcgtgcccgattccattatcttgcatattggtgacaccattgagattctaagtaatggaaagtataagagcatcttacatagagcgcttgtgaacaaggagaaagttagggtttcttgggcggtgttctgtgaaccgcccaaggagaagattatactgaaaccattaccagagacggtttcagaggctgagccaccactctttccgccacggacgtttcaacaacatatggaacataagttgtttaagaagaagaatggtgtagttgatccaaaatga

SEQ ID NO: 6 - protein, 355 aa, Hieracium pilosella
MVIVTNTRVESLSKSGIHEIPKEYIRPQDELPTITNILDEVSTDQGPQVPTIDLNDINSDDPKTLENCRNEFIKAATEWGVMHLVNHGISDDLIARVKAAGESFFGQPIEEKEKHSNDIASGKIQGYGSKLANNASGQLEWEDYFFHTVFPEDKRDLTVWPTTPTDYIPATEEYAKQIRALTTKILSVLSLGLGLEAGRLEEEVGGADELLLQLKINYYPKCPQPELALGVEAHTDLCALTFILHNMVPGLQLFYNDQWVTAKCVPDSIILHIGDTIEILSNGKYKSILHRALVNKEKVRVSWAVFCEPPKEKIILKPLPETVSEAEPPLFPPRTFQQHMEHKLFKKKNGVVDPK

SEQ ID NO: 7 - DNA, 1203 bp, Arabidopsis thalliana
atgaacaacctagacgagatcaagatcgagagcaagacctgcctcaacgatcaagaacaagaagtcaaaatagacaacatgcacatgagcgaccaagacaagaacaagatcgaaatcaagaacaagagtggcctcggcgaaaagtggccagaacccatcgtccgagtccaatctctagccgagagcaacctcactagtctccctgaccgttacatcaagccgccgtctcaacgccctcaaaccaccatcatcgaccaccaaccggaagtagctgacataaatataccgatcatagacctagacagtctattctctggcaatgaagacgacaagaagaggatatccgaggcatgccgtgaatggggattcttccaggtaatcaaccatggcgtgaagccggagctgatggacgcagctagagaaacttggaagagcttctttaatttgcctgttgaagccaaagaagtttactcaaactccccaagaacctatgaaggatatggaagcagattgggtgtggaaaaaggagccattcttgattggaatgattattactatctccattttcttcctcttgccttgaaggatttcaacaaatggccttctttaccttccaacattagagaaatgaatgatgagtacggtaaggaactagtgaagctaggtgggagactaatgacgatcttatcgtcaaatttggggctaagagcagaacaacttcaagaagcatttggtggagaagacgttggtgcatgtttgagggttaattattacccaaagtgccctcaaccggagcttgccctcggcctctcccctcattctgatcccggcggcatgaccatcctcttgccggacgatcaagtcgtcggccttcaggtccgtcacggtgacacgtggatcactgtcaatcctctccgccacgcttttatcgtcaatatcggcgatcaaattcagatactaagcaattcgaaatacaagagcgtggaacatcgagtgatagtgaattcggaaaaagaaagggtttcactagcattcttctataaccctaagagtgacattccgatccaaccaatgcaacaacttgtcacctctacgatgcctcccttgtatcctcccatgacctttgatcaatatagactcttcattagaacgcaaggtccacgtggaaaatcccacgttgagtctcatatatctcctcgttaa

SEQ ID NO: 8 - protein, 400 aa, Arabidopsis thalliana
MNNLDEIKIESKTCLNDQEQEVKIDNMHMSDQDKNKIEIKNKSGLGEKWPEPIVRVQSLAESNLTSLPDRYIKPPSQRPQTTIIDHQPEVADINIPIIDLDSLFSGNEDDKKRISEACREWGFFQVINHGVKPELMDAARETWKSFFNLPVEAKEVYSNSPRTYEGYGSRLGVEKGAILDWNDYYYLHFLPLALKDFNKWPSLPSNIREMNDEYGKELVKLGGRLMTILSSNLGLRAEQLQEAFGGEDVGACLRVNYYPKCPQPELALGLSPHSDPGGMTILLPDDQVVGLQVRHGDTWITVNPLRHAFIVNIGDQIQILSNSKYKSVEHRVIVNSEKERVSLAFFYNPKSDIPIQPMQQLVTSTMPPLYPPMTFDQYRLFIRTQGPRGKSHVESHISPR

SEQ ID NO: 9 - DNA, 1086 bp, Populus trichocarpa
atgatgaactgcttgcagagttggcctgaacctgtggttagagtccaatctttagcagcaagtggtatccgggcaatcccagagcgttatattaagccaccatcccatagacccttatcaaaaaatgacttttcaccacctcaagaggtaaacattcctgttattgatttccaaaacgttttctctgacgaccaacgcctccgtgacgaggccctccgtgatatctacagtgcttgccatgaatgggggttctttcaagtagtgaaccatggtgttagccatgaactgatgaagaggactagtgaggtttggcgagagttcttcaacttgccagtagaagtgaagcaggagtatgctaacactcctgctacgtatgaggggtatggtagtcggttaggggtggagaagggggcgatacttgattggagtgattatttcttccttaattatatgcctgtttctctcagaaaccaaaacaagtggcctgcaaccccagcttcttgcagggaattggtagctgagtatggcagtgaagtggttaaactttgtggaaagttgatgaaggtattctccatgaaccttggtctggaagaggactccctccttaacgcttttggtggagaagaaaacattggggcaggcttgagggtgaattactaccccaagtgtccccagccagaccttacactaggtctctccccacactctgaccctggtggaatgacccttctcctgcctgatgaaaatgtggctggcctacaagtctgtaggaagggcagttggctcactgttaagccgatcccaaatgccttcattatcaacataggagatcaaatccaggtactgagcaacgccatctatcagagtgtggagcacagggttattgtgaattctaatagtgatagagtctctcttgcccttttctataacccgaagagcgactcgctcattgaaccatccaaggagcttgtgtccgatgaccggccagctctctacccaccgatgagatttgatgaatacagactttacgttaggacaaagggtctctgcggcaaggaacaggttgaatccttaataatatcctag

SEQ ID NO: 10 - protein, 361 aa, Populus trichocarpa
MMNCLQSWPEPVVRVQSLAASGIRAIPERYIKPPSHRPLSKNDFSPPQEVNIPVIDFQNVFSDDQRLRDEALRDIYSACHEWGFFQVVNHGVSHELMKRTSEVWREFFNLPVEVKQEYANTPATYEGYGSRLGVEKGAILDWSDYFFLNYMPVSLRNQNKWPATPASCRELVAEYGSEVVKLCGKLMKVFSMNLGLEEDSLLNAFGGEENIGAGLRVNYYPKCPQPDLTLGLSPHSDPGGMTLLLPDENVAGLQVCRKGSWLTVKPIPNAFIINIGDQIQVLSNAIYQSVEHRVIVNSNSDRVSLALFYNPKSDSLIEPSKELVSDDRPALYPPMRFDEYRLYVRTKGLCGKEQVESLIIS

SEQ ID NO: 11 - DNA, 1086 bp, Populus trichocarpa
atgatggtgacttcatcattcgtagttccaagagttgagagtctggcaagcagtgggattcaatcaatcccaaaagaatatattcggccccaggaggagctaagtagcattcgcgatgttttcgaagaagagaagaaagttgaagggcctcaagttccaaccattgatttgaaggaaatggaatctgaggacaaagtggtccgtgagaaatgcagggaagagctagtcaaggcagctacagagtggggtgttatgcaccttgttaaccatggaattcctgatgatttgattgatcgtgtcaagaaagctggacaggctttctttgatcttcctattgaggaaaaggagaagcatgctaatgatcaggcttctggaaatgttcaagggtatggaagcaagctagctaacaatgctagtgggcagcttgagtgggaggactatttcttccatctcatttttcctgaggacaagcgtgacttctccatttggcctaagacacctagtgattatactgaagtcactagtgaatatgcaaggcagctgagaagtttagcaaccaaaattctgtcagtactgtcacttggcctgggattggaagaaggaagactagaaaaggaggtcggtggtctggaagagttgctactccaaatgaagatcaactactaccccaagtgccctcaaccagatctagccttaggggttgaagctcacagcgatgtaagtgcactcacttttatactccacaacatggtgcctggtctacaactcttatatgaaggcaagtggataacggcaaaatgtgtccccaactcaatcatcatgcacattggtgacactgttgagatcttgagcaatggaaaatacaagagtattattcacaggggacttgttaacaaggagaaggtaaggatttcatgggcagttttttgcgagccaccaaaggcgaaaatcatcctcaagccattggcagagattgtgactgaagctgagccaccattgttccctccccgcaccttttctcagcatatcgagcataagcttttcaggaagacccaagattctctcctacccagaaaagctaattaa

SEQ ID NO: 12 - protein, 361 aa, Populus trichocarpa
MMVTSSFVVPRVESLASSGIQSIPKEYIRPQEELSSIRDVFEEEKKVEGPQVPTIDLKEMESEDKVVREKCREELVKAATEWGVMHLVNHGIPDDLIDRVKKAGQAFFDLPIEEKEKHANDQASGNVQGYGSKLANNASGQLEWEDYFFHLIFPEDKRDFSIWPKTPSDYTEVTSEYARQLRSLATKILSVLSLGLGLEEGRLEKEVGGLEELLLQMKINYYPKCPQPDLALGVEAHSDVSALTFILHNMVPGLQLLYEGKWITAKCVPNSIIMHIGDTVEILSNGKYKSIIHRGLVNKEKVRISWAVFCEPPKAKIILKPLAEIVTEAEPPLFPPRTFSQHIEHKLFRKTQDSLLPRKAN

SEQ ID NO: 13 - DNA, 1005 bp, Glycine max
atggaggtgctaagggtgcaaaccatagcttccaaatccaaagatgctgccatcccagccatgtttgttagggcagagacagagcaaccaggcatcacaaccgttcaaggggtgaaccttgaggtgccaattattgattttagtgacccagatgaagggaaagtggtgcatgagattttggaggcaagtagggactggggcatgttccaaattgtgaaccatgacatacctagtgatgttataagaaagttgcaaagtgttgggaaaatgttctttgagttgccacaagaggaaaaagagttgattgctaagcctgctgggtctgattctattgaagggtatggcacaaagcttcagaaagaggtgaatggcaagaaagggtgggtggatcatttgttccacattgtgtggcctccttcctccatcaactacagtttctggccccaaaaccccccttcttacagggaagttaatgaggaatattgcaagcacctaagaggagtggtagacaaattgttcaaaagtatgtcggtagggttggggcttgaagagaatgagctaaaggagggtgcaaatgaagatgacatgcattatcttttaaaaatcaattattacccaccttgtccatgtcctgatctggtcttgggtgtgccaccacacacagacatgtcctacctcacaattctggtgcctaacgaggtgcagggccttcaagcatgtagggatggccattggtacgatgttaagtatgtccccaatgccctcgttattcacattggcgaccaaatggagatactgagcaatggaaaatataaggcagtttttcacagaacaacagtgaacaaagatgagacaagaatgtcgtggcccgtgttcatagaacccaaaaaggaacaagaagttggtcctcacccaaagttggttaaccaagacaatccaccaaaatacaaaaccaagaaatacaaggattatgcttattgtaagctcaataagatccctcaatga

SEQ ID NO: 14 - protein, 334 aa, Glycine max
MEVLRVQTIASKSKDAAIPAMFVRAETEQPGITTVQGVNLEVPIIDFSDPDEGKVVHEILEASRDWGMFQIVNHDIPSDVIRKLQSVGKMFFELPQEEKELIAKPAGSDSIEGYGTKLQKEVNGKKGWVDHLFHIVWPPSSINYSFWPQNPPSYREVNEEYCKHLRGVVDKLFKSMSVGLGLEENELKEGANEDDMHYLLKINYYPPCPCPDLVLGVPPHTDMSYLTILVPNEVQGLQACRDGHWYDVKYVPNALVIHIGDQMEILSNGKYKAVFHRTTVNKDETRMSWPVFIEPKKEQEVGPHPKLVNQDNPPKYKTKKYKDYAYCKLNKIPQ

SEQ ID NO: 15 - DNA, 1167 bp, Sorghum bicolor
atggcgagctgcatgcaggagtggccggagcccgtcgtccgcgtgcaggcgctcgccgagagcggcctgtccgtcatcccgcgctgctacgtcaagccgccgtgcgaccgccccgtcgtcgtggccccggcggcgccaacggcagtcaaggagacgaattcgaataaggcggccgaggcctcggacatcagcattccggtcgtcgacctcggcgagctgctgctgcaggcgaaggacgccggcgccggcggccttgtcgggaacgtcgtcaccgaggccgtcgcgtccgcgtgccgcgagtggggattctttcaggtggtcaaccacggggtgcgccccgagctgatgcgcgcggcgcgggagtcctggcgcggcttcttccgccgcccgctcgcggagaagcagcgctacgccaactcgccgcgcacgtacgagggctacggcagccgcctcggcgtccagaagggcgccgtcctcgactggggcgactacttcttcctccacctcgcgccggaggcggctaagagcgcggcaaacttctggccggccaaccccagcaactgcaaggaggtgtcggaggagtacgggcgcgaggtggtgcgggtgtgcgagctgctgatgcgggtgctgtccgtgagcctagggctggacgaggcgcacttccagcgggcgttcggcggggcggactgcggcgcgacgctgcgcgccaactactacccgcggtgcccgcagccggacctgacgctgggcctctccgcgcactcggacccgggcgccctcaccgtcctcctcgccgacgagaacgtccgcggcctgcaggtccgccgcggcgacgacggcgagtgggtcaccgtgcagcccgtccgcgacgccttcatcgtcaacgtcggcgaccaagtccagatactgagcaactccgtgtacaagagcgtggagcaccgggtggtcgtgaacgccgaggaggagcgcatatccctcgcgctcttctacaaccccaagggcgacgtccccatctccccggcgccagggctggtcaccgccgggaacctgccggcgctctacccgccgatgaccttcgacgagtacaggctctacatcaggaataagggcgccaggggcaaggcgcagatcgaggctctcaagggccaggcatcgccagaaaaataa

SEQ ID NO: 16 - protein, 388 aa, Sorghum bicolor
MASCMQEWPEPVVRVQALAESGLSVIPRCYVKPPCDRPVVVAPAAPTAVKETNSNKAAEASDISIPVVDLGELLLQAKDAGAGGLVGNVVTEAVASACREWGFFQVVNHGVRPELMRAARESWRGFFRRPLAEKQRYANSPRTYEGYGSRLGVQKGAVLDWGDYFFLHLAPEAAKSAANFWPANPSNCKEVSEEYGREVVRVCELLMRVLSVSLGLDEAHFQRAFGGADCGATLRANYYPRCPQPDLTLGLSAHSDPGALTVLLADENVRGLQVRRGDDGEWVTVQPVRDAFIVNVGDQVQILSNSVYKSVEHRVVVNAEEERISLALFYNPKGDVPISPAPGLVTAGNLPALYPPMTFDEYRLYIRNKGARGKAQIEALKGQASPEK

SEQ ID NO: 17 - DNA, 1062 bp, Arabidopsis thalliana
atggctacatgctggcctgagccgattgtttccgtgcaatccttgtcccaaaccggtgtaccaactgtaccaaaccgctatgtgaagccggctcatcagagaccggtctttaacaccacccaatccgatgctgggatagaaatccctgttctagacatgaacgacgtttgggggaaaccagaggggctaaggctcgtgaggagcgcgtgtgaggagtggggtttcttccaaatggtgaaccatggtgtgacccactcgttgatggagagagtgagaggagcgtggcgagagttcttcgagctaccgctagaggagaaacggaagtatgcaaactcaccggacacgtacgagggatatggaagccgccttggggttgtgaaagatgctaaattagattggagtgattatttcttcctcaattacttgccttcttccataagaaacccttccaagtggccatctcagcctcctaagatcagagaattgatcgaaaagtacggagaagaagtgagaaaactgtgcgaaaggctaacagagacgttgtcagagagtttaggtttaaaaccaaacaagctcatgcaggctttaggaggaggcgacaaagtcggagcttctctgaggacaaacttctacccaaaatgccctcagccgcagctcactttaggtctctcttctcattctgaccctggaggcatcaccattcttctcccggacgagaaggtcgctggccttcaggtccgtcgtggtgatggctgggtcaccattaaatcagtccctaatgctttgatcgttaacattggagatcaacttcagatacttagcaatggaatttacaaaagcgtggaacatcaagtgatcgttaattccggtatggaacgagtctctttggcattcttctataacccgagaagtgatatcccggttggaccaatcgaagaactagtaactgcaaaccgacctgctctttataaaccaatcaggttcgacgagtaccgttctctgataaggcaaaagggtccttgtggaaaaaaccaagtcgactcactgttattaactagataa

SEQ ID NO: 18 - protein, 353 aa, Arabidopsis thalliana
MATCWPEPIVSVQSLSQTGVPTVPNRYVKPAHQRPVFNTTQSDAGIEIPVLDMNDVWGKPEGLRLVRSACEEWGFFQMVNHGVTHSLMERVRGAWREFFELPLEEKRKYANSPDTYEGYGSRLGVVKDAKLDWSDYFFLNYLPSSIRNPSKWPSQPPKIRELIEKYGEEVRKLCERLTETLSESLGLKPNKLMQALGGGDKVGASLRTNFYPKCPQPQLTLGLSSHSDPGGITILLPDEKVAGLQVRRGDGWVTIKSVPNALIVNIGDQLQILSNGIYKSVEHQVIVNSGMERVSLAFFYNPRSDIPVGPIEELVTANRPALYKPIRFDEYRSLIRQKGPCGKNQVDSLLLTR

SEQ ID NO: 19 - DNA, 1071 bp, Arabidopsis thalliana
atggttgcggttgaaagagttgagagtctagcaaaaagcggaatcatatcgattccaaaagaatatattcgtccaaaagaagagctcgagagcatcaacgatgttttcctagaagagaagaaagaagacggtcctcaagttcccacaatcgatctaaagaacatcgagtcagacgatgaaaagatccgtgagaattgtattgaggagctgaaaaaggcatctttggattggggagtgatgcatttgatcaaccatggaataccagctgatctaatggagcgtgtcaagaaagccggagaagagtttttcagtttgtctgtggaagagaaggagaagtatgcaaacgatcaagccactggaaagattcaaggctatggaagtaaattggctaacaacgcgagtggacaattggaatgggaagattacttctttcatcttgcgtatcctgaagagaagagagatctatcaatttggcctaagacaccaagtgattacatagaagcaacgagtgagtacgcgaagtgtcttcgtttgctagcgactaaagtcttcaaggctctctctgtcggtctaggtttagagcctgaccgtctagagaaagaagttggtggtttagaagagcttcttctacaaatgaagataaattactatccaaaatgtcctcagcctgagctagcactcggtgtggaagctcacaccgatgtaagcgctttaactttcattctacacaacatggttccgggtttgcagcttttctacgagggcaaatgggtcactgcaaaatgtgttcctgattcgattgtgatgcacattggggatactttggagattcttagtaatgggaagtataagagtatacttcatcgtgggttggtgaataaggagaaggttaggatttcttgggctgtgttttgtgaacccccaaaggataagattgttcttaagccgttgccggagatggtgagtgttgagtctccggctaagtttcctccacggacttttgctcaacatattgagcataagttgtttgggaaggaacaagaggaattggtatccgagaaaaatgattaa

SEQ ID NO: 20 - protein, 356 aa, Arabidopsis thalliana
MVAVERVESLAKSGIISIPKEYIRPKEELESINDVFLEEKKEDGPQVPTIDLKNIESDDEKIRENCIEELKKASLDWGVMHLINHGIPADLMERVKKAGEEFFSLSVEEKEKYANDQATGKIQGYGSKLANNASGQLEWEDYFFHLAYPEEKRDLSIWPKTPSDYIEATSEYAKCLRLLATKVFKALSVGLGLEPDRLEKEVGGLEELLLQMKINYYPKCPQPELALGVEAHTDVSALTFILHNMVPGLQLFYEGKWVTAKCVPDSIVMHIGDTLEILSNGKYKSILHRGLVNKEKVRISWAVFCEPPKDKIVLKPLPEMVSVESPAKFPPRTFAQHIEHKLFGKEQEELVSEKND

SEQ ID NO: 21 - DNA, 1176 bp, Oryza sativa
atggacaccacggcaagctgcagcttgcccgacgcctggccggagcccgtcgtcccggtgcaatccttgtcggaagccggcgtctccgccgtgccgccgcaatacatcaagccgccacaggatcgcccggttctccccgcgccaagcctcgacgtccccaccgtcgacgtcgccgcgttcctcgacctcgacggcgccgccgccgcttgcgctgctgccgagcagctgaagaacctagccgaggcatgctcgaagcatggcttcttccaggttgtcaaccatggcgtgcaggcaagcaccgtggagaggatgagaggcgcgtggaggaggttctttgccctagagatggaggagaagaaggcgtgctccaactcgccgtcggcgccggaagggtacggcagccgcgccggagtcgagaagggagctctccttgactggggtgactactatttcctcaacattttgccgagggagatcaagcgtcgtaacaagtggccaaaatcaccgcatgacctaagggagatcacggaggattacgggcgtgatctgatgaatctctgtgaagtgctactcaaagccatgtcgctgagcttgggattaggtgagaaccaactccacgcggccttcggcagcgacgacggcatctcggcgtgcatgcgagtgaactactaccccaagtgcccccagccggagctaacgctgggcatctcctcccactccgacgccggcggcatcgccgtgcttctcgccgacgaccgtgtgaaggggacgcaggtgctaaagggggacacgtggtacacggtgcagccgatccccaatgcatttctagtcaacgttggcgaccagattcagatcataagcaacgacaagtacaagagcgtggagcaccgcgcagtggcgagctccgatgacgcgcggttcaccgtcgccttcttctgcaaccctagcgggaaccttccgatcggcccggcagctcagctggtgagctcgcagtcgccggcgctctacacgcccatcgtcttcgacgagtaccgcaggttctcccgcaggagggggctcaaagggaagtcccagctcgaggccatgaagaacagcaagatagctcaagtggaacttattgcctaccgagatgcacagatcaacttgaggaacttgtttacttctgataaaaattaa

SEQ ID NO: 22 - protein, 391 aa, Oryza sativa
MDTTASCSLPDAWPEPVVPVQSLSEAGVSAVPPQYIKPPQDRPVLPAPSLDVPTVDVAAFLDLDGAAAACAAAEQLKNLAEACSKHGFFQVVNHGVQASTVERMRGAWRRFFALEMEEKKACSNSPSAPEGYGSRAGVEKGALLDWGDYYFLNILPREIKRRNKWPKSPHDLREITEDYGRDLMNLCEVLLKAMSLSLGLGENQLHAAFGSDDGISACMRVNYYPKCPQPELTLGISSHSDAGGIAVLLADDRVKGTQVLKGDTWYTVQPIPNAFLVNVGDQIQIISNDKYKSVEHRAVASSDDARFTVAFFCNPSGNLPIGPAAQLVSSQSPALYTPIVFDEYRRFSRRRGLKGKSQLEAMKNSKIAQVELIAYRDAQINLRNLFTSDKN

SEQ ID NO: 23 - DNA, 1059 bp, Oryza sativa
atggaaaccgccgcggcggcgccgccgcgcgtgcaggccctagccgacgccggcgtctccttcctcccggcgcagtacgtccagccgccggaactccgcccggaccccaccaccaccacccaccgccgcgccccgaccgccgcctccctctccgtccccgtcgtcgacctctcatcgcccggtgcgggcgacgccgtccgccgcgcgtgcgccgagtggggcgccttccacgtggtcggccacggcgtccggccggggctgctcgacgcgatgcgtggggcggggctcgccttcttccgctcccccatggaggagaagctccggttcgcctgcgaccaggccaggggcgccgccgccgaggggtacggcagccggatgctcgccaacgacgactccgtgcttgactggcgcgactacttcgaccaccacaccctcccggattcccgccgcgatcccacccggtggcccgatttcgtccccggctacagggacactgttgtgaaatacagcgacagcatgaaagatctcgctcaaaaattgctgcgcattgtctctgaaagtctgaacttgccaccttcgtatatagaagaagcagtgggggaagtttatcagaatattactgttagctactattctccttgcccacaacctgatcttgctcttggattgcaatctcattctgatatgggtgcaataacacttctaatacaagatgatgtgggtgggcttgaagtactgaaggacgggctgtggatacctgttccttctttgcctgatggaatccttgtaattttggctgaccagacagagatcataaccaatggaagatacaagagtgctgtgcatcgagctattgtcaatgctgatcgtgcccgcttgtcagtagcaacattctacgatccatccaaatctcgaaaaatttgtactgctccacagctcgtttgcaaggagcatccacagaagtaccgggatgtgatatatggtgactatgtctcatcttggtatagcaaaggcccagagggcaagcgcaacattgatgccctcctgatcgagcaatag

SEQ ID NO: 24 - protein, 352 aa, Oryza sativa
METAAAAPPRVQALADAGVSFLPAQYVQPPELRPDPTTTTHRRAPTAASLSVPVVDLSSPGAGDAVRRACAEWGAFHVVGHGVRPGLLDAMRGAGLAFFRSPMEEKLRFACDQARGAAAEGYGSRMLANDDSVLDWRDYFDHHTLPDSRRDPTRWPDFVPGYRDTVVKYSDSMKDLAQKLLRIVSESLNLPPSYIEEAVGEVYQNITVSYYSPCPQPDLALGLQSHSDMGAITLLIQDDVGGLEVLKDGLWIPVPSLPDGILVILADQTEIITNGRYKSAVHRAIVNADRARLSVATFYDPSKSRKICTAPQLVCKEHPQKYRDVIYGDYVSSWYSKGPEGKRNIDALLIEQ

SEQ ID NO: 25 - DNA, 1092 bp, Anthurium andraeanum
atggccaccgaggttatgacggcagtgccggcggggtcgagggtggagagcctggcgagcagcggaatccaggccatccccccggagtacgtccggcccgcggaggagcgagtcagcctcaccgacgcgctcgaggcggccaggagagcggaggacggcccgcagatccccacggtggacgtcgcggggttctcgtccggggacgaggcggcgcggcgcgcgtgcgcggaggcggtgcggcgggccgcgacggactggggggtgatgcacgtcgtcaaccacggcatcccgctggagctgatccggcgcatgcaggcggccggggaggccttcttcgccctccccatcgaggagaaggagaagtacgccaacgaccagtcgtccgggaacatccagggctacgggagcaagctcgccaacaatgccagcggccagctcgagtggcaggactacttcttccacctcatcttccccgaggacaaggccaacttctctatctggcccaagcagcccgccaactacgttgaagagacgagggagttcgggcggcagctgcgggtggtggcgagcaagatgctggcgatgctgtcgctggggctgggggtggaggaagggaagctggaagcggaggtgggcggcatggaggacctgctgctgcagatgaagataaactactacccgcggtgcccgcagccggagctggcggtgggcgtggaggcgcacacggacgtcagcgccctcagcttcatcctccacaacatggtgcccgggctgcaggtgcacaacgagggccagtgggtgacggcgcgctgcgtccccgactccatcatcatgcacgtcggcgacgtcgtggagatcctcagcaacgggcagtacaagagcatcctccaccgcggcctcgtcaacaaggagaaggtccgcgtctcctgggccgtcttctgcgagcccccgcgcgacaagatcctgctccagcccctgcccgacatcctcggccagggccaccccgcgcagttccccccgcgcaccttctcccagcacatccagcacaagctcttccgcaagacccaaggtgacttcgccacccccaactag

SEQ ID NO: 26 - protein, 363 aa, Anthurium andraeanum
MATEVMTAVPAGSRVESLASSGIQAIPPEYVRPAEERVSLTDALEAARRAEDGPQIPTVDVAGFSSGDEAARRACAEAVRRAATDWGVMHVVNHGIPLELIRRMQAAGEAFFALPIEEKEKYANDQSSGNIQGYGSKLANNASGQLEWQDYFFHLIFPEDKANFSIWPKQPANYVEETREFGRQLRVVASKMLAMLSLGLGVEEGKLEAEVGGMEDLLLQMKINYYPRCPQPELAVGVEAHTDVSALSFILHNMVPGLQVHNEGQWVTARCVPDSIIMHVGDVVEILSNGQYKSILHRGLVNKEKVRVSWAVFCEPPRDKILLQPLPDILGQGHPAQFPPRTFSQHIQHKLFRKTQGDFATPN

SEQ ID NO: 27 - DNA, 1059 bp, Allium cepa
atgcccatagaaagcgtgataattgcaccaccagctccaagagtagagaccctctcgaaatccaacctccactccattcctttggaatacatccggccagagcacgagcgggcctgcctaggcgatgcattagaacagcttcacaactccaactccggcccacaaattccgataaccgacctcgactcacgcgactgcattgagaaagtgaccaaagcagccaaagaatggggagtcatgcacattgtgaaccatggaatctctagcgagttgatggagaaagtgcgtgcagctggcaaggcttttttcaatctcccactcgaggctaaagaggaatatgctaacgatcaatctaaagggaagatccaagggtatggaagtaaactggcaaataatgcaagcgggcaactcgagtgggaggactacttttttcatctcatttttcctgatgacaaggtcgatctctccgtttggcctaaacagccttccgactacattgaaattatgcaagagtttggaagtcagctgagaatattagccagcaaaatgctatccatactttcattgggcttacaactaccaaccaaggacaggctagaacaagaactaaaaggaccagaagacttacttctccagctgaaaataaactactacccaaaatgcccccagccacatctggcattaggagtggaagcccacactgacgtgagtgccttatcgttcatactgcacaacaacgttccaggccttcaagtgttgtacgagggtgaatgggtaactgcgaaactcgttccagattccttgattgtccatgttggggattcgcttgaaattttgagtaatgggatttacaaaagtgtgttgcatcgcggtttggttaataaggagaaggtgaggatttcttgggctgtgttctgtgaaccgccaaaggatgctgttgtgcttaagccattggatgaggttgtgacagacgatgcgcccgcaaggtacactcctcgcacgtttgcacagcatctggaacggaagttgtttaaaaagaaaggttggagatttggatga

SEQ ID NO: 28 - protein, 352 aa, Allium cepa
MPIESVIIAPPAPRVETLSKSNLHSIPLEYIRPEHERACLGDALEQLHNSNSGPQIPITDLDSRDCIEKVTKAAKEWGVMHIVNHGISSELMEKVRAAGKAFFNLPLEAKEEYANDQSKGKIQGYGSKLANNASGQLEWEDYFFHLIFPDDKVDLSVWPKQPSDYIEIMQEFGSQLRILASKMLSILSLGLQLPTKDRLEQELKGPEDLLLQLKINYYPKCPQPHLALGVEAHTDVSALSFILHNNVPGLQVLYEGEWVTAKLVPDSLIVHVGDSLEILSNGIYKSVLHRGLVNKEKVRISWAVFCEPPKDAVVLKPLDEVVTDDAPARYTPRTFAQHLERKLFKKKGWRFG

SEQ ID NO: 29 - DNA, 996 bp, Oryza sativa
atggcggaggtgcagagcgtgcaggcgctggcgtcgtcgctggcggcgctgccgccggagttcgtgcgttccgagcacgagcggccgggggcgaccacgttccgcggcggcgacgcgccggagatcccggtgatcgacatggcggcgcccgagtccgccgcgcgcgtggcggaggcggcggcggagtgggggctcttccaggtggtgaaccacggcgtgcccgccgcggcggtggcggagctgcagcgcgttgggcgcgagttcttcgcgctgccgcaggaggagaaggcgcggtacgccatggacgcgtcctccggcaagatggagggctacggcagcaagctgcagaaggacctcgagggcaagaaggcgtgggccgacttcttcttccacaacgtcgcgccgccggccatggtcaaccacgacatctggcccagccatccggctggctacagggaggcgaacgaggagtactgcaagcacatgcagcggctggcgcggaagctgttcgagcacctgtcgacggcgctgggactggatggcggcgccatgtgggaggcgttcggcggcgacgagctggtgttcctgcataagatcaacttctacccgccgtgcccggagccggagctaaccctcggcgtcgcgccgcacaccgacatgagcacgttcaccgtcctcgtccccaacgacgtccagggcctccaggtattcaaggatggccactggtacgacgtcaagtacgtccccgacgccctcatcatccacatcggcgaccagatcgagattctgagcaacgggaggtacaaggcggtgctgcatcggacgacggtggacaaggacaggacgcggatgtcgtggccggtgttcgtcgagccgccgccggagcacgtcgtcgggccgcacccgcagctcgtcaccgacgggagcccggccaagtacaaggccaagaagttcaaagattaccggcactgcaagatcaataagctccccatgtaa

SEQ ID NO: 30 - protein, 331 aa, Oryza sativa
MAEVQSVQALASSLAALPPEFVRSEHERPGATTFRGGDAPEIPVIDMAAPESAARVAEAAAEWGLFQVVNHGVPAAAVAELQRVGREFFALPQEEKARYAMDASSGKMEGYGSKLQKDLEGKKAWADFFFHNVAPPAMVNHDIWPSHPAGYREANEEYCKHMQRLARKLFEHLSTALGLDGGAMWEAFGGDELVFLHKINFYPPCPEPELTLGVAPHTDMSTFTVLVPNDVQGLQVFKDGHWYDVKYVPDALIIHIGDQIEILSNGRYKAVLHRTTVDKDRTRMSWPVFVEPPPEHVVGPHPQLVTDGSPAKYKAKKFKDYRHCKINKLPM

SEQ ID NO: 31 - DNA, 1008 bp, Antirrhinum majus
atggaaggcgagagagtgcaagccattgcttccctatccaaatatgcggacacaattccatccgagtttattcggtccgaaaacgagcaaccggcggccaccaccttgcgcggcgtggtgctcgaggtgcccgtcatcgatcttagcgatgattttaacgagaaaatactcgtaaaaaatatatcagaggcgagtcgggattggggtatttttcaggtggtgaaccatggaatttcaaatgaagttatatcaaaattgcaaaaagttgggaaagagttttttgagttgccaaaagaggagaaagagtttgtggccaaaactcctgagtctggaattgaaggctatggaactattttgcaaaaggaagttgagggaaagaaaggatgggtggatcatttgtttcataagatatggccaccttctgccattaactacaagttttggcctaagaatccaccctcttacagagaagcgaacgaggagtacacaaagaagattagggacgtgtccgacaagttgacgaattggttgtcactaggcctaggtataaaagggcatgagttgaaggcggcaatgggtggcgatgacactatttttctaatgaaaattaactattatccgccgtgtccccgccctgacctcgccctaggggtggtggcgcacaccgacatgtcgtttctcaccattctcgtgcctaatgaggtgcaagggctacaagtttttagagatgaacattggtatgatgtcaagtacattcctaatgctctcattgtacacataggagaccaaattgagatacttagcaatgggaaatacaaggctgtatttcatagaacaacagtgaacaaaaagaatactaggatgtcatggcctgtgtttttggagccacatccagagtttgaagttggacctattccagaacttgtgagtgaagaaagcccatcaaaatataagaccaagaaatataaagattatgtttattgtaagcttaacaaaattcctcagtga

SEQ ID NO: 32 - protein, 335 aa, Antirrhinum majus
MEGERVQAIASLSKYADTIPSEFIRSENEQPAATTLRGVVLEVPVIDLSDDFNEKILVKNISEASRDWGIFQVVNHGISNEVISKLQKVGKEFFELPKEEKEFVAKTPESGIEGYGTILQKEVEGKKGWVDHLFHKIWPPSAINYKFWPKNPPSYREANEEYTKKIRDVSDKLTNWLSLGLGIKGHELKAAMGGDDTIFLMKINYYPPCPRPDLALGVVAHTDMSFLTILVPNEVQGLQVFRDEHWYDVKYIPNALIVHIGDQIEILSNGKYKAVFHRTTVNKKNTRMSWPVFLEPHPEFEVGPIPELVSEESPSKYKTKKYKDYVYCKLNKIPQ

SEQ ID NO: 33 - DNA, 969 bp, Arabidopsis thalliana
atggattcagactttgttcctccttctgtttcttttcagctcccggttatcgatttctctgaccaaaacctaaaaccaggaagctcaaagtgggatgaagtgacagctgatgtccttaaagctctagaagactacggttgtttcgaagcttcctttgacaaattgtcagtggagcttaatagatctgtttttgaagctatggaagaccttttcgagttgcctattccgaccaaacagagaaacgtgtcttcaaaacccttccatggatatctttgtcataatctttacgagagtttggggatcaatgatgccaatgttttggagaaagtcaacgactttactcaacagttatggcctgatcatgggaacaagagtattagtgagacgatacacctgttttcggagcaattagtggaattggatttgatggtgagaagaatgataatggagagttttggaatagaaaattacattgatgaacatctgaattctacatattaccttacgcgattgatgaaatatacatcacctcctgatgatgatgatgatgatgatgaggaaactaagttaggtttacgctctcatacggataagaacatcatcacgatccttcatcagtatcaagttgatggtttggaagtgaagactaaagacgataaatggatcaaagtgaaaccatctcaagattctgtccttgttatggttggagattctctttgtgcacttttgaatggtcgattgcattctccatatcaccgggtcataatgacaggaaaaaagacaaggtattcaactggactgttctcaattccaaaaacaggagttatcattgattcaccagaagaacttgtcgacaaagaacatccacgaatattcaaaccctttgaatacacagattttcttcacttctttcagacagaagctggacgtatagctcaatcagctctccatgctttcgctgccttttga

SEQ ID NO: 34 - protein, 322 aa, Arabidopsis thalliana
MDSDFVPPSVSFQLPVIDFSDQNLKPGSSKWDEVTADVLKALEDYGCFEASFDKLSVELNRSVFEAMEDLFELPIPTKQRNVSSKPFHGYLCHNLYESLGINDANVLEKVNDFTQQLWPDHGNKSISETIHLFSEQLVELDLMVRRMIMESFGIENYIDEHLNSTYYLTRLMKYTSPPDDDDDDDEETKLGLRSHTDKNIITILHQYQVDGLEVKTKDDKWIKVKPSQDSVLVMVGDSLCALLNGRLHSPYHRVIMTGKKTRYSTGLFSIPKTGVIIDSPEELVDKEHPRIFKPFEYTDFLHFFQTEAGRIAQSALHAFAAF

SEQ ID NO: 35 - DNA, 990 bp, Physcomitrella patens
atgtttgattcaattcctattatagatgttggaccgctagttcggaagaagggtgatgaggactttagagaggatccagaggtgaggaatgtagtgcaccagcttgatcttgcctgccgcaacgttgggtttttctacgtgagcgggcatggaattcctctggagttgtgtcaagctgtacttgacgtgggccatgagtttttttctcaaccggagtcccagaagctgcgcatcgccatgtccagcagcacaggtttcagaggataccagaagctgggagagaacgtcacaaagggtcttccagatcagcatgaagctattgattatttcaaggagtttgaatccacaaaagttgcattgagatcagagaaccctcttgtgggtctgaatcagtggcctgattctgtgagcaagtttcgaccgctcgtgcaagagtacttagaaatgctgatagaactggcaaggacaattatgcgaggtatagccttagcacttgggggaccaaaagatttgtttgaaggcgaaagagcaggagacccgttttggatacttagagtgattgggtatccaccaataagcaacctcagctgtctcagtaatccaaatggcgaggaagttggatgtggcgatcacactgactatggcctgctaactctcgtgaatcaagacctagacataactgcacttcaggtgaagacccaggacggaaaatatatttgggtggatccaataccagggacttttgtggtgaacattggcgacatgctcacgatctggacgaatggcttgtaccagtcaacactgcatcgggtaatgaataacgacagcaagtatcgggtgtctgttcctttcttctatgagccaaatttcgatgctcgagtggagccttttagctttttgcaggattcgacagctgctgagagcaagaggtatacaccagtcgtctacggcgatcacgttatcaataaagtgttgaacaactttggttaa

SEQ ID NO: 36 - protein, 329 aa, Physcomitrella patens
MFDSIPIIDVGPLVRKKGDEDFREDPEVRNVVHQLDLACRNVGFFYVSGHGIPLELCQAVLDVGHEFFSQPESQKLRIAMSSSTGFRGYQKLGENVTKGLPDQHEAIDYFKEFESTKVALRSENPLVGLNQWPDSVSKFRPLVQEYLEMLIELARTIMRGIALALGGPKDLFEGERAGDPFWILRVIGYPPISNLSCLSNPNGEEVGCGDHTDYGLLTLVNQDLDITALQVKTQDGKYIWVDPIPGTFVVNIGDMLTIWTNGLYQSTLHRVMNNDSKYRVSVPFFYEPNFDARVEPFSFLQDSTAAESKRYTPVVYGDHVINKVLNNFG

SEQ ID NO: 37 - DNA, 942 bp, Medicago truncatula
atggcaggaacggcaacagtgaatcttccaatcataaacctctcctcacctgatcgtctttcctcagccaattccatccgtcaggcatgtgttgagtatggtttcttttaccttgtgaaccacggtgtggacaaagattttatgaagcaagcgttcgagcagagtgcaaagtttttttcacttccaattgaagacaaaattaaattgaaccgcaaggagtacagaggttatactcctctctatgctgagaaacttgacccttcactctccaaaggtgatccaaaagagagctattacattggctctttggaagataccactagtgttcgtttgaatcaatggccttctgataaattactaccaaattggaaacccacaatggaatccttattttggaaaacactgtcagctggcaaagagttgttgtctctaattgccttgtctttgaatcttgatgaagattactttcagaagatcagtgcctcaaacaaaccggatgcttttcttcgccttttgcgctatccaggtgaattgggatgttgtggtgcctctgctcattcagattatggcatgatcactctcctaatcaccaatggtgttccaggactacagatatgcaaagagaagttgaagcaacctcaggtgtgggaggatgtgtctcatgtagaaggggccataattgtgaacattggggacataatggagagatggacaaattgtgtataccagtcaacccttcacagggtgatgccaaccggaaaagaacgctattctgtggcattctacatggatccaccttcagactgtatagtgaaatgctttgaaagttgctgcagtgaatcatctcctcccagattccctccaatacgtagtgcagactacttcaatgagcgattcaagctcatatatgggtctgaaaaggatcttaaatggtccctttag

SEQ ID NO: 38 - protein, 313 aa, Medicago truncatula
MAGTATVNLPIINLSSPDRLSSANSIRQACVEYGFFYLVNHGVDKDFMKQAFEQSAKFFSLPIEDKIKLNRKEYRGYTPLYAEKLDPSLSKGDPKESYYIGSLEDTTSVRLNQWPSDKLLPNWKPTMESLFWKTLSAGKELLSLIALSLNLDEDYFQKISASNKPDAFLRLLRYPGELGCCGASAHSDYGMITLLITNGVPGLQICKEKLKQPQVWEDVSHVEGAIIVNIGDIMERWTNCVYQSTLHRVMPTGKERYSVAFYMDPPSDCIVKCFESCCSESSPPRFPPIRSADYFNERFKLIYGSEKDLKWSL

SEQ ID NO: 39 - DNA, 990 bp, Solanum lycorpersicum
atgaagaatgatggaattgattctgccaacatttctgctttacactgtatcgatctctccagccctgacattcatacctctgtttctctcctcaaacaggcttgcttagattcaggatttttctatgttgtcaatcatggtattagccaggagtttatggatgaggttttcgctcaaagcaaaaagctctttgatcttcctttggaagagaagatgaagcttcttagaaatgaaaaacatcggggctacactcctagtctagatgaacatttggatcctgacaatcaaataaatggtgactataaggagggatattacattggtgttgaagtacctgaagatgatcctgaagctcagagaccattttatgggtcaaatgtgtggcctactgcaggtaccctgcctggatggaaggaaactatggagaagtatcatcaagaggcacttgaggtgacaaaagcagtatcaaggctcatagcccttgcacttgatcttgatgttgacttttttgatcggccagagtttcttggcagaccaattgctactttgcgcctactgcattatgaaggcaaactttctgatccatcaaatggaatttttggagctggtgcacattctgactatggtctgataactcttttggccacagatgatgtctctggccttcagatatgcaaggataaggatgcaaagcctcagatttgggagtatgtgccaccattgaaaggtgcttttgtagtgaatcttggtgatatgcttgagcgctggagcaatggtgttttcagatcaacactgcatcgggtccttgcaaatggtcaagaaagattttctattgcatattttatggagccaagtcacgactgtcttgttgaatgcttgccaacctgccaatcaaaagtcaacccaccgaggtatcctccaatcaaatgcgagacgtacttgctccaacgttacaaagacactcatgctgatagaaattcttacaaatga

SEQ ID NO: 40 - protein, 329 aa, Solanum lycorpersicum
MKNDGIDSANISALHCIDLSSPDIHTSVSLLKQACLDSGFFYVVNHGISQEFMDEVFAQSKKLFDLPLEEKMKLLRNEKHRGYTPSLDEHLDPDNQINGDYKEGYYIGVEVPEDDPEAQRPFYGSNVWPTAGTLPGWKETMEKYHQEALEVTKAVSRLIALALDLDVDFFDRPEFLGRPIATLRLLHYEGKLSDPSNGIFGAGAHSDYGLITLLATDDVSGLQICKDKDAKPQIWEYVPPLKGAFVVNLGDMLERWSNGVFRSTLHRVLANGQERFSIAYFMEPSHDCLVECLPTCQSKVNPPRYPPIKCETYLLQRYKDTHADRNSYK

SEQ ID NO: 41 - DNA, 1014 bp, Aspergillus fumigatus
atgaccaagccacagccacctccaatcctcgatttctccgtcttctatggccatgacagccaagcaaaagcccagctcgtgcagcgagtgcgcgaatgctgtctgaacaacggcttctttcagatcaccggccacaaagtctcgccagagttgcagcggcggacgttcgactgcgccaaacgattcttcgacctaccacttatcgaaaagaagaagattgagcgaagccccgatgccttcaaccgtggctacgaagccttccagtcacacatgtcccagccaggcagcgctcctgaccggaaggagggccttttcctgggcccagaccttgcagaggatcatccgtactgtgttcagaagaagctgaattgcggaccaaaccggtggccccagggactcgacgacctagaagagttcaaactcgtctcgatggaatattatgccgctctgtttcagctggcaaaggatgtcgttgctgtgctcgccctcacaatggattatgaggagacattctttgatcccctgaccgagggcgccatcgccacgctacgatatctgcactatccacctcaacccgtgggtgacgctgaggcggggctggggactggtgcccatcgggactacagttgtatcactctgctcctgcaagacggaactggcggccttcaggttttggatgagcccaccggacaatggctggatgttaaaccagtccccggggcatacatcgtcaatctggctaatgtattcgcgcgcatgacaaacggacactacaaatctgctctacatcgggtggtcaataagtctgggatggagcgctattcgatcccgttcttcttcactggcaacccggactatgtgtgcgagtgcttgtcgcgattccggaaagagggagagccggtcagacatcctcctgccacggtgcatgaggtggttgcggaagcagtgagaggcaccgtcgagagagcaaaccgttataatgcggaacgtcaggggatccacgcggcgcagtaa

SEQ ID NO: 42 - protein, 337 aa, Aspergillus fumigatus
MTKPQPPPILDFSVFYGHDSQAKAQLVQRVRECCLNNGFFQITGHKVSPELQRRTFDCAKRFFDLPLIEKKKIERSPDAFNRGYEAFQSHMSQPGSAPDRKEGLFLGPDLAEDHPYCVQKKLNCGPNRWPQGLDDLEEFKLVSMEYYAALFQLAKDVVAVLALTMDYEETFFDPLTEGAIATLRYLHYPPQPVGDAEAGLGTGAHRDYSCITLLLQDGTGGLQVLDEPTGQWLDVKPVPGAYIVNLANVFARMTNGHYKSALHRVVNKSGMERYSIPFFFTGNPDYVCECLSRFRKEGEPVRHPPATVHEVVAEAVRGTVERANRYNAERQGIHAAQ

SEQ ID NO: 43 - DNA, 981 bp, Pseudomonas stutzeri
atgaacgaatccctttgcgcccgccatctcgaagccgccgcgctgccgctgatcgacatcgccgggctgttttctcccgatctcgacgagcgcgccgccgtggccgaacgcatcggtgcggcctgtcgcgaggtcggtttcttctgtatcgccaaccacggcgtcgacgcggcgctgcagcaggcggtgttcgagcaggcgcgggccttcttcgccctgccggaacccggcaagcgcgcactggacaagctgttctcgaaggccaatcgcggctatgagccgttgcgcgggcaggtgctggaagccggtgcgccggccgatctcaaggaaggcttctacatcggcgaggagctggccgaggacgacccgcgggtactggccgggcgtttcaaccacggtgccaaccagtggccgagcgagctcgcggagtttcgcccgaccatggagcgctatcgcgacgcgatgaatgcgctggcgaatcggctgatgggggccatcgcgctgtcgctgcaactgccggaggaacatttcgccggcttctgccgcgactccatgagcaccctgcgcctgctgcattacccgccgcagccggccaattccgcgcccggcgaaaagggctgtggcgcgcataccgatttcggagggctgacgctgcttctgcaggacgagaatcccggcctgcaggtctgggatcgtcacagcaagagctggattcacgcggcccctgtgcccggcacctatgtggtcaatctgggcgacatgatcgcccgctggaccaacgaccagtaccgttcgacgctgcaccgggtggtcaacatgtccggacgcgagcgctacagcgtgccgttcttcttcagcggcaacccggaccacgtggtcgagtgcctgccgacctgcctcgcgcccggcgaggcgccgcgctaccccgcggtgacggtggaagaacaccaccgcgagatgtaccggaggacctatggctga

SEQ ID NO: 44 - protein, 326 aa, Pseudomonas stutzeri
MNESLCARHLEAAALPLIDIAGLFSPDLDERAAVAERIGAACREVGFFCIANHGVDAALQQAVFEQARAFFALPEPGKRALDKLFSKANRGYEPLRGQVLEAGAPADLKEGFYIGEELAEDDPRVLAGRFNHGANQWPSELAEFRPTMERYRDAMNALANRLMGAIALSLQLPEEHFAGFCRDSMSTLRLLHYPPQPANSAPGEKGCGAHTDFGGLTLLLQDENPGLQVWDRHSKSWIHAAPVPGTYVVNLGDMIARWTNDQYRSTLHRVVNMSGRERYSVPFFFSGNPDHVVECLPTCLAPGEAPRYPAVTVEEHHREMYRRTYG

SEQ ID NO: 45 - DNA, 1008 bp, Burkholderia phymatum
atgtcggccacgagtgcagcaaccgcgcgcatccccatcatcgacctcgccggcgtgcgcggcggcgaccgcgacgcgctcgcgcgcgcgggccgcgagatccgcgacgcgtgcacgacgatcggcttcttctacatcgtgaatcatggtgtgccgcaggcggcgatcgatcgtgcggaaaaggccgcgcgccagttcttcgcctttcccgtcgaaacgaaacggcgcgtggccgtgaatcggcggcatcgcggcttcaatgcattgggcgacgcgaccatgtatcaggcgaagcgtcccgactacaaagagttctacagcatcggcctcgagctgcccgagaacgaccccgatgtgctggcaggccaggcgttgcgcgggccgaacaactggccggatttcatgcccgaattgcagcccgcgttgtacagctattacgaggaagtgggcgcgtgcggcgcggatctgttgcgcgcagtggcgacgggcctcggcgtgagcgaagattttttcgcatcgcgctacacgaagcgcatgcagcgcacgcaaatggtctactatccgccgcagccgccgcaatccgatgaagagcagttcggcgtggcgcctcataccgactacggctgcatcacgctgttgtggcaggatcgggtaggcggcctgcaggtgcgcgagatcgcgaacgatacgtggatcgacgcaccgcccatcgaaggcagcttcgtcgtgaatgtcggcgacctgctggcgcgctggacgaatgaccgctttcgttcgacgctgcatcgcgtgatcaacgcatcgggccgcgaacgttattccatcgcgacgttctacgacccgacctatacgtcgcccgtcgatccgcacgacctgggcacggcggatgccgactgcaagtacgagcccgtcgcagcgggcgactatattctcgggcgcatcaatagttcgatgggctatcggaagaagctggcagcagcgcaaggcacatcacaagggatcgaatga

SEQ ID NO: 46 - protein, 335 aa, Burkholderia phymatum
MSATSAATARIPIIDLAGVRGGDRDALARAGREIRDACTTIGFFYIVNHGVPQAAIDRAEKAARQFFAFPVETKRRVAVNRRHRGFNALGDATMYQAKRPDYKEFYSIGLELPENDPDVLAGQALRGPNNWPDFMPELQPALYSYYEEVGACGADLLRAVATGLGVSEDFFASRYTKRMQRTQMVYYPPQPPQSDEEQFGVAPHTDYGCITLLWQDRVGGLQVREIANDTWIDAPPIEGSFVVNVGDLLARWTNDRFRSTLHRVINASGRERYSIATFYDPTYTSPVDPHDLGTADADCKYEPVAAGDYILGRINSSMGYRKKLAAAQGTSQGIE

SEQ ID NO: 47 - DNA, 963 bp, Pseudomonas aeruginosa
gtggaccgtctacccatcatcgacatcgccccgctctacggcgccgaccgcggcgcctggaacgacgtggcgcggcggatcgaccaggcctgccgcgagtggggcttcttctatatcgccgggcacccgttgccggccgcgcgcttcgaagccctgctggcggcggcgcgggagttcttcgcgctgcccgtcgaagagaagctgaagatcgatatcacccgcagccgcaaccatcgcggctacggcgcgatcgccaccgagcagctcgacccggcgttgcccagcgacttcaaggaaaccttcgacatggccctgcacctgccggcggagcatccggacgtgggcgccggcacgtccttctacgggcccaaccggcaccccgacctgcccggctgggaggcgctgctggaggggcattacgccgacatgctggcgctggcccgtaccgtgctgcgcgccctggccatcgccctggggatcgaggaggacttcttcgaccgccgcttcgagcagccggtcagcgtgttccgcctgatccactatccgccggccgccgaccggcagagcgccgaccagcccggcgccggcgcgcacaccgactacggctgcgtgaccctgctctaccaggacgccgccggcggcctgcaagtgcagaaccgccagggcgaatggatcgacgcaccgccgatcgacggcaccttcgtggtcaacatcggcgacatgatggcgcgctggagcaacgaccgttatcgctcgaccccgcaccgggtgctcagcccgcgcggagtggaccgttattccatgccgttcttcgccgagccgcacagcgacaccgagatccgctgcctgccgggctgtttcgacgcggacaatccgccgaggtacccgccgaccacctgcggcgagtggctgacctcgcgcttcgcccagacctatgcctatcggcgcggcgagacggcctga

SEQ ID NO: 48 - protein, 320 aa, Pseudomonas aeruginosa
MDRLPIIDIAPLYGADRGAWNDVARRIDQACREWGFFYIAGHPLPAARFEALLAAAREFFALPVEEKLKIDITRSRNHRGYGAIATEQLDPALPSDFKETFDMALHLPAEHPDVGAGTSFYGPNRHPDLPGWEALLEGHYADMLALARTVLRALAIALGIEEDFFDRRFEQPVSVFRLIHYPPAADRQSADQPGAGAHTDYGCVTLLYQDAAGGLQVQNRQGEWIDAPPIDGTFVVNIGDMMARWSNDRYRSTPHRVLSPRGVDRYSMPFFAEPHSDTEIRCLPGCFDADNPPRYPPTTCGEWLTSRFAQTYAYRRGETA

SEQ ID NO: 49 - DNA, 1005 bp, Pseudomonas aeruginosa
atgagcactccgagtctgccgatcatcgatatcgccgcccttgccggcagcgacccggcggcgcgacggtcggtcgccgtgcgaatcgaccgcgcctgccgcgagcagggcttcttctacgtggtcgggcacggcgtcgaggcgcaactggtcgagcgcctggagcgcctggcgcggcagttcttcgccctcgacgagacgagcaagctgcgttggcgcatggagcttggcgggcgcgcctggcgcggctatttccctcttggcggcgaactgacctccaaccgcccggactggaaggaaggcttgtacctgggcagcgaactggacgctgagcatcccgaagtgcgcgccgggacgccgctgcatggagccaacctgttccccgaggtgcccggcctgcgcgagacgctgctggagtacctggacgcaaccacccgcgtcggccaccggctgatggagggcatcgccctcggtctgggactggaagccgactacttcgccgcgcgctataccggcgatccgctgatcctcttccgcctgttcaattacccgagccagccagtgccggagggcctcgacgtgcagtggggcgtcggcgaacacaccgactacggcctgctcacgctgctccaccaggacgccatcggcggcctgcaggtgcgcaccccacagggctggctggaggctccgccgataccgggctcgttcgtctgcaacctcggagacatgctcgaacgcatgaccggcggcctctaccgcagcacgccgcaccgggtggcacgcaacacttcggggcgcgaccgcctgtcgttcccgctgttcttcgatccgaacttccatgcccgcgtgcagcccatcgaagggctgcccgaggtgccggaacaggatgacagcgcccgtcgctgggaccaggccaacgtccacgctttccacggcgagtacggcgactacctgctgaacaaggtggccaaggtattcccgcagttgcgccgcgacctgctctag

SEQ ID NO: 50 - protein, 334 aa, Pseudomonas aeruginosa
MSTPSLPIIDIAALAGSDPAARRSVAVRIDRACREQGFFYVVGHGVEAQLVERLERLARQFFALDETSKLRWRMELGGRAWRGYFPLGGELTSNRPDWKEGLYLGSELDAEHPEVRAGTPLHGANLFPEVPGLRETLLEYLDATTRVGHRLMEGIALGLGLEADYFAARYTGDPLILFRLFNYPSQPVPEGLDVQWGVGEHTDYGLLTLLHQDAIGGLQVRTPQGWLEAPPIPGSFVCNLGDMLERMTGGLYRSTPHRVARNTSGRDRLSFPLFFDPNFHARVQPIEGLPEVPEQDDSARRWDQANVHAFHGEYGDYLLNKVAKVFPQLRRDLL

SEQ ID NO: 51 - DNA, 1014 bp, Gibberella zeae; identical to SEQ ID NO: 41

SEQ ID NO: 52 - protein, 361 aa, Gibberella zeae
MATTTVQITAPAEYTTVQLLTPNGPVSRRVRCGKPRTPTLEEMPIIDLSSIDGDESARKALSTQIKAAAENTGFFYVSNHGIPQDLIEEALQQCKNFFDQSQDDKDRVAFTKAGKFCGYHGVGSTQINNKETKDNKETFSMRYDTRIDPSHDCVDDINSNFDSIDFVWNGTSHLTKFRPVLTEFYQRRLTLARKLIRLFALALELPEDYFDSIITTPGADAVHLHYPGTEETDDIDVGIGSHTDIQCVTLLWQDMSGGLQVLSADDEWLDARPIEGTLVINIGDFLQRLSNNRFKSTVHRVYNRQKASRYAMPFFLGFNPDAVCEVVPTCTDAEHPPLYEPISCGEWRSSRLRLAETGKLN

SEQ ID NO: 53 - DNA, 1026 bp, Mycobacterium smegmatis
atgccgatccggacgctggccgtggcgggccgtctgcccgatgatggcggggtgactgctctgagcaccgcattgcctgtcgtggatctcggtgacgacgctgcagtggtgaccgatcagctccgcagggtggcgcacgaggtcggcttcttctatctcgtcggccacggcgtcccacaggatctcgtcgaccgcgtgctcaccgccgcgcgtcgactgttcgcgctgccgcaggccgacaaggacgcgatcgcgatggtcaacagcccgcacttccgcgggtacacgcggctcggtggtgagctgaccggtggccaggtggactggcgcgaacagatcgacatcggacccgaacgggagccgctggacgatccggcagagccgtatctgcgtctgcagggcccgaaccagtggcccgcggcgctgcccgaactgcccgctgtgatcgccgagtgggacgccgcgctcgcgcaggtggggcgcgcgttgctgcgtcactgggccgttgccttgggcaatccggccgacgtgttcgacgaggcgttcgccgacaccccggccacgctgatcaagatcgtccggtatcccgcgcaggccgagacatcgcagggcgtcggcgcccatcgcgacgccggcgtgctcacgctgctactggccgagccaggcagccgcggactgcaggtccggggcccggacggggtgttcatcgacgtcgaccccctgccgggcgcgttcatcgtgaacatcggcgagatgctcgagatcgccagcggcggctacctgcgggcgaccgaacaccgggtgcaggtgagcgcctccgagcgcatctcggtgccctacttcttcaacccgcggctcgacgcagccataccagtgctcgcgcttcccgacgaactggccgcgcaggccaggggcgtgaccgcggacccgtcgaacgaccgcatctattcggtgtacgggcgcaacgcctggaagagccgcgtgcgtgcgcacccagatgtggcagccgctcacggctacgtgtga

SEQ ID NO: 54 - protein, 341 aa, Mycobacterium smegmatis
MPIRTLAVAGRLPDDGGVTALSTALPVVDLGDDAAVVTDQLRRVAHEVGFFYLVGHGVPQDLVDRVLTAARRLFALPQADKDAIAMVNSPHFRGYTRLGGELTGGQVDWREQIDIGPEREPLDDPAEPYLRLQGPNQWPAALPELPAVIAEWDAALAQVGRALLRHWAVALGNPADVFDEAFADTPATLIKIVRYPAQAETSQGVGAHRDAGVLTLLLAEPGSRGLQVRGPDGVFIDVDPLPGAFIVNIGEMLEIASGGYLRATEHRVQVSASERISVPYFFNPRLDAAIPVLALPDELAAQARGVTADPSNDRIYSVYGRNAWKSRVRAHPDVAAAHGYV

SEQ ID NO: 55 - DNA, 966 bp, Schizosaccharomyces pombe
atgggatccttagaagtaccgtgcattgacctttctgaaaatgatacttccattgtcgtgaaagaattgctcgatgcttgtaaaaattggggattcgtttctttgaagaatcatggaattccgctagatgaaatagatcgtacatttaagcttgcagacaaattttttgatattcctgtagaagaaaagcagaaatatttgttcaagggtggccgattacatagtggatacacagggcattttggtgagaagttagatatggaacaccagtcgagaggtgatttgaaagaatcctatgatttagcaggatttccagatccaaaattagaaaacctttgtccgtttattgcggagcacatggatgaatttctccaattccaaaggcattgttataaactaacattgagattattggatttttttgccattggatttggaattccgccagattttttcagcaagagccatagctctgaagaggacgttcttcgacttttaaaatacagtatacctgaaggagttgaaagacgtgaagatgatgaagatgctggtgcacactcagattacggttccattaccctgcttttccaaagggatgcagcaggtttggaaattcgtccacctaattttgttaaagatatggattggatcaaagtaaatgtccaaccagacgtagttttggtaaacattgctgacatgctccaattttggactagcggaaagttgagaagcactgttcatcgtgttcgaattgaccccggtgttaagactcgtcaaacgatcgcatactttgttactcctgatcctgaaactcctttgagtccactgttcgaagaaaagactggaaaagacattgaaactgttactgccggagaatggatagatggtcgtataaacttcacctatgggtatagtgcaccaccaaaaggatatttaggaagccaaaatgatggtattgtggcataa

SEQ ID NO: 56 - protein, 321 aa, Schizosaccharomyces pombe
MGSLEVPCIDLSENDTSIVVKELLDACKNWGFVSLKNHGIPLDEIDRTFKLADKFFDIPVEEKQKYLFKGGRLHSGYTGHFGEKLDMEHQSRGDLKESYDLAGFPDPKLENLCPFIAEHMDEFLQFQRHCYKLTLRLLDFFAIGFGIPPDFFSKSHSSEEDVLRLLKYSIPEGVERREDDEDAGAHSDYGSITLLFQRDAAGLEIRPPNFVKDMDWIKVNVQPDVVLVNIADMLQFWTSGKLRSTVHRVRIDPGVKTRQTIAYFVTPDPETPLSPLFEEKTGKDIETVTAGEWIDGRINFTYGYSAPPKGYLGSQNDGIVA

SEQ ID NO: 57 - DNA, 1080 bp, Oryza sativa
atgccggccatcgcggattgcgcggccgacccgccgctggcggacagctactacacgctgctccgcctcggcggggacgacgacgacgacgcgtgcacgaaggtgaccacgacgccgcagcccgtgtcggagtgcgagctcccgatgatcgacgtcggttgcctgacggcgccgaccggcgccgccgccgccgccgccgtggggcagcagcatcaagccgaggagagggcggcctgcgcggcggccatcgcggcggcggccgcggagtgggggttcttccaggtggtgaaccacggcgtcgcgcaggagctcctggaggcgatgcgccgggagcaggcgcggctgttccgcctcccgttcgaggccaagtccagcgccggcctcctcaacgactcctaccgctggggcaccccgaccgccacctcgctccgccagctctcctggtcggaggccttccacctcccgctcgccggcatctccggcaaatcctgcaactacggcgacctcacctccctcagggacgtgacgcgggaggtggcggacgcgatgtcgaggctggccagggcgctggcgcgcgtgctggcggagagcctcctgggccacgccgccggcgagcgattcccggaggggtgcgacgacgcgacgtgcttcctccggctgaaccgctacccgccgtgccccttcccaccggacgacgccttcggcctggtcccgcacaccgacagcgacttcctcaccgtgctctgccaggaccacgtcggcggcctgcagctcatgaagggctcccgctgggtcgccgtcaagcccatccccggcgccctcatcgtcaacatcggagacctttttcaggcgtggagcaacaacaggtacaagagcgtggagcacagggtgatgacgaacgcgacgacggagagatactccgtcgcctacttcctctgcccgtcgtacgactcgcccatcggcacgtgcagggagccttccccttacaaggcgttcaccttcggggagtacaggcgaagggtgcaggaagacgtcaagaagacggggaagaagactggcctcagtaatttcctcgtatga

SEQ ID NO: 58 - protein, 359 aa, Oryza sativa
MPAIADCAADPPLADSYYTLLRLGGDDDDDACTKVTTTPQPVSECELPMIDVGCLTAPTGAAAAAAVGQQHQAEERAACAAAIAAAAAEWGFFQVVNHGVAQELLEAMRREQARLFRLPFEAKSSAGLLNDSYRWGTPTATSLRQLSWSEAFHLPLAGISGKSCNYGDLTSLRDVTREVADAMSRLARALARVLAESLLGHAAGERFPEGCDDATCFLRLNRYPPCPFPPDDAFGLVPHTDSDFLTVLCQDHVGGLQLMKGSRWVAVKPIPGALIVNIGDLFQAWSNNRYKSVEHRVMTNATTERYSVAYFLCPSYDSPIGTCREPSPYKAFTFGEYRRRVQEDVKKTGKKTGLSNFLV

SEQ ID NO: 59 - DNA, 939 bp, Physcomitrella patens
atgttttcggccagttcgcataccttgcccaccatagacctgcactccgcacatctaggagagcaagtagtatctgcatgccgggactgggggtttttccaagttcacaaccatggcatcccgccggagcttctcaacaggctgcgggcacacgctcactgtttctttgagttaccattgcaacagaaagaacgagtagccgcatgtaagtcgaataatttctacggctatggcgtctccaaggcacgtacatacttccctaacgactggatggaggcctttgacatggagtggacgcccatctcacgagtgcgccgacacgtgcagcaagtcgggctagcgcacgctcgatacgaggatttttgtggcgcggtggaggactacgcctcaaagacggagaagctagccgtgcggctgacagagcaggtagcgttgggacttggactcgacgccacagcgttctctcggcacttcgaagaatcgaccacttctactgtccgcatgaactactaccccccacatccgaacccttcccgaacgctgggcatctcgcctcattccgatttcaacatcttcacaattctgctgcacgacaccgtgcccgggctgcaagttctcaaggacggcaaatggatcaccgtgaagccaagcccggacacgttagtcatcaacgtcggggatacttttcaggcgtggtgtaacgggagaatcaagagcgtgatgcaccgggcactcgtaaacgcaaccgagcctcgattgacggtagtgcacttcttcggccctcaccctgacacgatgatcgtgcctccggcggcattggtagacaacgataatcctctgcgttacaggagctttgcatacaaggaaatggtggagcagatcatgcacatccgcggcaagagcgtgttcgagagtcccctcacgtcattccttctgtaa

SEQ ID NO: 60 - protein, 312 aa, Physcomitrella patens
MFSASSHTLPTIDLHSAHLGEQVVSACRDWGFFQVHNHGIPPELLNRLRAHAHCFFELPLQQKERVAACKSNNFYGYGVSKARTYFPNDWMEAFDMEWTPISRVRRHVQQVGLAHARYEDFCGAVEDYASKTEKLAVRLTEQVALGLGLDATAFSRHFEESTTSTVRMNYYPPHPNPSRTLGISPHSDFNIFTILLHDTVPGLQVLKDGKWITVKPSPDTLVINVGDTFQAWCNGRIKSVMHRALVNATEPRLTVVHFFGPHPDTMIVPPAALVDNDNPLRYRSFAYKEMVEQIMHIRGKSVFESPLTSFLL

SEQ ID NO: 61 - DNA, 1026 bp, Populus trichocarpa
atgccaagaagatttgtttggccaaaacaagacttagttggtgctcatcaagagctcacggagccagtcgtggaccttgagggtttctttagaggtgacgaggaggcaataaagcaggcttctgatatcattaaggctgcttgcttgcaacatggttttttccaagtgatcaatcatggagttgatctcaatctcattagtctcgcccatgatcacatgcataatttctttaagcttccaacttgcgataaactaagggttcggaggatgccaggtagcatttgggggtattctagtggacatgctgatcggtatttgtctaaattgccatggaaagagacgttatcttttggctacaatgaaaactgtccgaatcctatcgggatagactttttcaagtctaccttagggaaggattttgaacaaacaggcttggtctatctaaaatattgtgaggctatgaagggtttgtccctctccataatggaactattggcaatcagcttgggagttgatcgagggtattacaaaagtttttttgaagatggttgctctataatgagatgtaacttctaccctccttgtcaagagccaggtcttattctaggcactggacctcatcgtgatcccacatcgctaaccatacttcaccaagatcaagtcggaggtctagaagttttttcagacaacgtatggcagacggttcgtccccgtcaaagtgcccttgttattaacattggcgatacctttatggccttatcgaatgggacctacaagagctgcctgcacagggctgtggtcaacaagtacgaggagaggagatcgttggcattctttctttgcccaaaagaagacaaggtggtgagaccaccactggatcttgtgtgcaatcaagggagaaggatgtacccagactttacatggtcggatttgctccatttcacacagaagtactacagagctgatgatgctacccttcagaacttcaccaaatggatcatttctctaaaatcagcaagcctctaa

SEQ ID NO: 62 - protein, 341 aa, Populus trichocarpa
MPRRFVWPKQDLVGAHQELTEPVVDLEGFFRGDEEAIKQASDIIKAACLQHGFFQVINHGVDLNLISLAHDHMHNFFKLPTCDKLRVRRMPGSIWGYSSGHADRYLSKLPWKETLSFGYNENCPNPIGIDFFKSTLGKDFEQTGLVYLKYCEAMKGLSLSIMELLAISLGVDRGYYKSFFEDGCSIMRCNFYPPCQEPGLILGTGPHRDPTSLTILHQDQVGGLEVFSDNVWQTVRPRQSALVINIGDTFMALSNGTYKSCLHRAVVNKYEERRSLAFFLCPKEDKVVRPPLDLVCNQGRRMYPDFTWSDLLHFTQKYYRADDATLQNFTKWIISLKSASL

SEQ ID NO: 63 - DNA, 1149 bp, Acacia mangium
atggttgttgagtgcataacaaataatcttccctccatgcctcacccagcaaaacatggaaccaaagaagataaagaagatgagcctttggtttttgatgcctctcttcttaggtatgaacataatcttccaaagcagtttatatggcctgatgaagagaagccctgtttgaatcctcctgagcttgttgttccactcgtagacctcagagggtttctctctggagaccctgtagcggccatggaaacttctaaacttgtgagtgaggcatgcagaaagcatggattcttccttgttgttaaccatgggattgattctagattgatctctcatgctcaccgtttcatggatgacttctttgagcttcccctgtctcagaaacagagagctcagaggaaaacaggggagcactgcggctatgctagtagcttcactagcagattctcctctaaactcccatggaaggagacactttctttccaattctctgcagacaaaaactcacaaaacctcgtcaaagattacttatgcgaaaaagtgggccatgagttcgagcaattcgggatggtttatcaggagtattgtgaagccatgagcaatctttctttggtcataatggagcttttaggaatgagcctcggagttgggagaacgtgctttagggaattcttcgataagaacaattcaataatgaggctcaattattacccaccttgtcaaaaaccagacctcactttgggcactggtcctcactgtgatccaacctccttaactattcttcaccaagacaaagtaggtggcctccaagtttatgtcgacaatgagtggcattcaattaccccaaatttcaatgcttttgtggtcaatattggtgataccttcatggctctttcaaatgggagatacaagagttgtttgcatagggcagtggtgaacagccaaacaacaagaaaatctcttgctttcttcttatgtccaggagatgataaggtagtgactccaccaagtgaattagtggaccatgtgagcccaaggatttacccagatttcacatggcccatgcttcttgagttcactcagaaacattacagagcagacatgaacaccctcgagcaatttgccaactgggttcaacgaaacaagtcctga

SEQ ID NO: 64 - protein, 382 aa, Acacia mangium
MVVECITNNLPSMPHPAKHGTKEDKEDEPLVFDASLLRYEHNLPKQFIWPDEEKPCLNPPELVVPLVDLRGFLSGDPVAAMETSKLVSEACRKHGFFLVVNHGIDSRLISHAHRFMDDFFELPLSQKQRAQRKTGEHCGYASSFTSRFSSKLPWKETLSFQFSADKNSQNLVKDYLCEKVGHEFEQFGMVYQEYCEAMSNLSLVIMELLGMSLGVGRTCFREFFDKNNSIMRLNYYPPCQKPDLTLGTGPHCDPTSLTILHQDKVGGLQVYVDNEWHSITPNFNAFVVNIGDTFMALSNGRYKSCLHRAVVNSQTTRKSLAFFLCPGDDKVVTPPSELVDHVSPRIYPDFTWPMLLEFTQKHYRADMNTLEQFANWVQRNKS

SEQ ID NO: 65 - DNA, 1140 bp, Helianthus annuus
atggcaatagattgcataatcaagaatccatcacccatgtcttccctcaaagaggaccgacaaaggtcacttgtgtttgatgcatcggtcctacaacacgaaggcaacataccccaacagttcatatggccggatcatgagaaacccaacacccaaaaatcaaaagaacttgaggttcctttgatagacttaggaggcttcctttctggacactcgtgttctaccaagaaagcctccaatctcgttggggaggcgtgtcaaaaacatggtttcttcctagtggttaatcatggagttgatgaaaacctaatttcggatgctcaccagtatatggacttattttttgagcttccactttcggaaaagcaaagagcacaaagaaaagccggtgagagctgtggatatgccagcagcttcactgggcggttttcatctaaactgccttggaaagagacactctctttccaatactcagcggatgagaactcttccgatatagttaaggactattttaaggataaaatgggtgaagaatttatacggctcgggaacgtttatcaagattattgcaatgccatgaatagactttcgcttgggatcatggagttactagggatgagcctcggtgtgagccgagctcacttcaaggaatttttccaagaaaataattcaataatgagattaaactactatccaccatgtcaaaagccagaccttaccttagggacagggcctcattgtgatccaacatctttgacaatcctacaccaagataacgttggtggactagaagtgtttgtggacaatgagtggcgttccattgcaccaaattcacaagcttttgttgtcaacatcggtgacacgttcatggcactctcaaatggaagatacaaaagttgcttacatagagctgtggtaaatagcaaaactcctagaaagtcacttgcattctttctatgtccaaagaaagataaggtggtgagcccaccagaaaaattagtggaccaaaaaaaccctaggatatatccagattttacatggtctacctttcttgagttcactcagaagcattatagagctgacatgaataccctcaaagctttctcaaactgggttcaacaggagaccagcagaacttga

SEQ ID NO: 66 - protein, 379 aa, Helianthus annuus
MAIDCIIKNPSPMSSLKEDRQRSLVFDASVLQHEGNIPQQFIWPDHEKPNTQKSKELEVPLIDLGGFLSGHSCSTKKASNLVGEACQKHGFFLVVNHGVDENLISDAHQYMDLFFELPLSEKQRAQRKAGESCGYASSFTGRFSSKLPWKETLSFQYSADENSSDIVKDYFKDKMGEEFIRLGNVYQDYCNAMNRLSLGIMELLGMSLGVSRAHFKEFFQENNSIMRLNYYPPCQKPDLTLGTGPHCDPTSLTILHQDNVGGLEVFVDNEWRSIAPNSQAFVVNIGDTFMALSNGRYKSCLHRAVVNSKTPRKSLAFFLCPKKDKVVSPPEKLVDQKNPRIYPDFTWSTFLEFTQKHYRADMNTLKAFSNWVQQETSRT

SEQ ID NO: 67 - DNA, 1113 bp, Phaseolus vulgaris
atgttgatccctcatccatcaatgctacttgcatcacaaaacaccaacatggaaccacaacaaatcaacttacaggctcctactccaaaccagtcaaacataccctctgagttcgtctggcctgataatgagaaaccatgccttgaaccaccaaaactcaaaattccacccattgacatgaagggctttctctctggagacccagaaactgtgtcagccatttgtgctgaagtgaacgcggcatgcaggaagcatggcttctttcttgttgtcaaccatggtgttgacaagaagctcgtagagaaagctcataagctcatagacactttcttctgcatggaactgccagagaagcagaagcttcagagaaaacttggagaacattgtggctatgctaatagctttattggaaggttctcctccaaacttccttggaaggaaacactttctttccattacgcccctgataccaaaactgttgaggactatttcctaaattctatgggggaagagttcagggaatttgggagtttctttcaagaatactgtgaagtgatgagcaatctgtctcttgagatcatggagctgctgggaatgagcctaggagtgagcagggaatgtttcagggatttcttcaaaaacaatgagtctgttatgaggttgaattactacccaccatgccataaacctgagttagctttaggaactggacctcattgtgaccccacttccctaaccgttctccaccaagatcaagtcgagggcctccaagtgtttgtcgatggaaaatggtgctctgtcgccccaaaagaagatgctttcgttgtcaacattggcgacacatttatggctctttccaatgggatattcaagagttgcttacatagagcagttgtgaacaaccaaattgtgagaaaatctcttgctttcttcctatgtccaaataaagacaaagtggtcagtgctccaaaggaactaattaccgtggagaatccaaagaaatatccagatttcacatggccaaatcttcttgagttcacacagttacattacaggtctgaccctgaaacacttgatgccttcgccaactgggtactagagaagaacaagtga

SEQ ID NO: 68 - protein, 370 aa, Phaseolus vulgaris
MLIPHPSMLLASQNTNMEPQQINLQAPTPNQSNIPSEFVWPDNEKPCLEPPKLKIPPIDMKGFLSGDPETVSAICAEVNAACRKHGFFLVVNHGVDKKLVEKAHKLIDTFFCMELPEKQKLQRKLGEHCGYANSFIGRFSSKLPWKETLSFHYAPDTKTVEDYFLNSMGEEFREFGSFFQEYCEVMSNLSLEIMELLGMSLGVSRECFRDFFKNNESVMRLNYYPPCHKPELALGTGPHCDPTSLTVLHQDQVEGLQVFVDGKWCSVAPKEDAFVVNIGDTFMALSNGIFKSCLHRAVVNNQIVRKSLAFFLCPNKDKVVSAPKELITVENPKKYPDFTWPNLLEFTQLHYRSDPETLDAFANWVLEKNK

SEQ ID NO: 69 - DNA, 1158 bp, Gossypium hirsutum
atggtacattgtctgccaaaggtttctgtcattcaagacaagccgatgcttccaccaactgctgctgtcgcaaagaataagcatcgccctttagctttcgatgcatcaatccttggatctgagatatcctctcagttcatatggcctgacgacgacaagccatgcctggatgccccggaacttgtaattccaaccattgacttgggagctttcttgcttggggactctcttgctgtatcaaaagcggcagaggcggtgaatgaggcatgcaagaagcatgggttttttctggttgtaaaccatggggtggattcagggcttatagacaaagctcatcagtacatggaccgcttcttcagcctgcaactctctgagaagcaaaaggctaagagaaaagtaggagaaagctatgggtatgcaagcagtttcgttgggaggttttcctccaagttgccatggaaagaaacactgtcttttcggtactgtcctcacactcaaaacatcgtgcaacactatatggtgaattggatgggtgaagattttagagatttcgggaggctttaccaggaatattgtgaagccatgaacaaggtttcccaagagataatggggctgctagggataagtctaggacttgaccaagcctacttcaaagactttttcgacgaaaatgattcaatcctgagactgaatcactaccctccatgccaaaagcctgagttgactctggggactggtccccacaccgatcccacttccttgacaatccttcatcaggatcaagttggaggccttcaagtgtttgcagatgaaaagtggcactccgttgctcccatcccacgagctttcgttgtcaacattggcgacacattcatggctttgacaaacggtatttacaagagctgcttgcacagagcagtggtgaatactgaaacggtgagaaaatcacttgtattctttctatgtcccaagctggagagaccggtgacaccagcagctggcctagttaatgccgcaaattcgaggaagtacccagactttacttgggcagcactgcttgaatttacacagaaccattaccgtgctgacatgaaaacccttgttgcattctccaaatgggttcaagaacaagaatcgaacaacaaattaataccttag

SEQ ID NO: 70 - protein, 385 aa, Gossypium hirsutum
MVHCLPKVSVIQDKPMLPPTAAVAKNKHRPLAFDASILGSEISSQFIWPDDDKPCLDAPELVIPTIDLGAFLLGDSLAVSKAAEAVNEACKKHGFFLVVNHGVDSGLIDKAHQYMDRFFSLQLSEKQKAKRKVGESYGYASSFVGRFSSKLPWKETLSFRYCPHTQNIVQHYMVNWMGEDFRDFGRLYQEYCEAMNKVSQEIMGLLGISLGLDQAYFKDFFDENDSILRLNHYPPCQKPELTLGTGPHTDPTSLTILHQDQVGGLQVFADEKWHSVAPIPRAFVVNIGDTFMALTNGIYKSCLHRAVVNTETVRKSLVFFLCPKLERPVTPAAGLVNAANSRKYPDFTWAALLEFTQNHYRADMKTLVAFSKWVQEQESNNKLIP

SEQ ID NO: 71 - DNA, 1134 bp, Medicago truncatula
atggaatcaattaacactcctagccttccctttttccctccacctaaggaccaacaaggtgaaaacaaggtccaattttttgacttcaccttactgcaaaaagaaggaaatgtaccaaaagagttcatttggccttctgagcattgggtgaaaagcagtggagaaaatattgagctacctcttattgacataggtgtcatcaagagtgatgaggctgcaatggctaatgctgctaggattgtgagggaggcatgcataaaacatggtgcctttgaagtcactaacattggtgtggattcagatttcatcaatgctgttcttcaagaaacctacaacattttcaagcttcctttgagcaagaaaattactgctatagccaaagattctggcttttcagttgctcatgcagagaggtatactactgttttaccatggaaagagacatttactttcatgtacaaacacaacaccaaaaatgagacacaagttgttgatgttgtcaattctctcttgggtgaagactttcaacaatccgggttggtgtatcaaaagtactctgatgcaatgaatgatttaactgaggtgattatggagctattggccattagtttgggtgtggatcgcaaacattatcaaagattttttgaagatgctgagtcaatgatgagatgcaacttttatccaccttgcagtgctaacctcactggtgctcttggcaatggccctcattgtgacccaatctctatcactattctccttcaagatcaagttggaggtcttgaagtttttgctgacaacaaatggcttgctgtgcccccaaagcctgatacctttgtcatcaacataggtgacaccttcatggcactgaccaatgggttgtacaagagttgcctacatagggttttggtaagcaacgagctggagaggaagtccttgactttcttcttgaatccaagaggagacaaaacagtgagtcctccaaatgaacttttggaaaatgaagaagctagaaaatatcctgattacaaatggtcagaactatatgagtatacacaaaaaactcgtagggttgatgctagcacactcgacagtttcattgcttggcgtcactcttctgagacatccaaattttag

SEQ ID NO: 72 - protein, 377 aa, Medicago truncatula
MESINTPSLPFFPPPKDQQGENKVQFFDFTLLQKEGNVPKEFIWPSEHWVKSSGENIELPLIDIGVIKSDEAAMANAARIVREACIKHGAFEVTNIGVDSDFINAVLQETYNIFKLPLSKKITAIAKDSGFSVAHAERYTTVLPWKETFTFMYKHNTKNETQVVDVVNSLLGEDFQQSGLVYQKYSDAMNDLTEVIMELLAISLGVDRKHYQRFFEDAESMMRCNFYPPCSANLTGALGNGPHCDPISITILLQDQVGGLEVFADNKWLAVPPKPDTFVINIGDTFMALTNGLYKSCLHRVLVSNELERKSLTFFLNPRGDKTVSPPNELLENEEARKYPDYKWSELYEYTQKTRRVDASTLDSFIAWRHSSETSKF

SEQ ID NO: 73 - DNA, 1008 bp, Arabidopsis thalliana
atggtaattgtgttacagccagccagttttgatagcaacctctatgttaatccaaaatgcaaaccgcgtccggttttaatccctgttatagacttaaccgactcagatgccaaaacccaaatcgtcaaggcatgtgaagagtttgggttcttcaaagtcatcaaccatggggtccgacccgatcttttgactcagttggagcaagaagccatcaacttctttgctttgcatcactctctcaaagacaaagcgggtccacctgacccgtttggttacggtactaaaaggattggacccaatggtgaccttggctggcttgagtacattctccttaatgctaatctttgccttgagtctcacaaaaccaccgccattttccggcacacccctgcaattttcagagaggcagtggaagagtacattaaagagatgaagagaatgtcgagcaaatttctggaaatggtagaggaagagctaaagatagagccaaaggagaagctgagccgtttggtgaaagtgaaagaaagtgattcgtgcctgagaatgaaccattacccggagaaggaagagactccggtcaaggaagagattgggttcggtgagcacactgatccacagttgatatcactgctcagatcaaacgacacagagggtttgcaaatctgtgtcaaagatggaacatgggttgatgttacacctgatcactcctctttcttcgttcttgtcggagatactcttcaggtgatgacaaacggaagattcaagagtgtgaaacatagagtggtgacaaatacaaagaggtcaaggatatcgatgatctacttcgcaggtcctcctttgagcgagaagattgcaccattatcatgccttgtgccaaagcaagatgattgcctttataatgagtttacttggtctcaatacaagttatctgcttacaaaactaagcttggtgactataggcttggtctctttgagaaacgacctccattttctctatccaatgtttga

SEQ ID NO: 74 - protein, 335 aa, Arabidopsis thalliana
MVIVLQPASFDSNLYVNPKCKPRPVLIPVIDLTDSDAKTQIVKACEEFGFFKVINHGVRPDLLTQLEQEAINFFALHHSLKDKAGPPDPFGYGTKRIGPNGDLGWLEYILLNANLCLESHKTTAIFRHTPAIFREAVEEYIKEMKRMSSKFLEMVEEELKIEPKEKLSRLVKVKESDSCLRMNHYPEKEETPVKEEIGFGEHTDPQLISLLRSNDTEGLQICVKDGTWVDVTPDHSSFFVLVGDTLQVMTNGRFKSVKHRVVTNTKRSRISMIYFAGPPLSEKIAPLSCLVPKQDDCLYNEFTWSQYKLSAYKTKLGDYRLGLFEKRPPFSLSNV

SEQ ID NO: 75 - DNA, 990 bp, Arabidopsis thalliana
atggcggtattgtctaaaccggtagcaataccaaaatccgggttctctctaatcccggttatagatatgtctgacccagaatccaaacatgccctcgtgaaagcatgcgaagacttcggcttcttcaaggtgatcaaccatggcgtttccgcagagctagtctctgttttagaacacgagaccgtcgatttcttctcgttgcccaagtcagagaaaacccaagtcgcaggttatcccttcggatacgggaacagtaagattggtcggaatggtgacgtgggttgggttgagtacttgttgatgaacgctaatcatgattccggttcgggtccactatttccaagtcttctcaaaagcccgggaactttcagaaacgcattggaagagtacacaacatcagtgagaaaaatgacattcgatgttttggagaagatcacagatgggctagggatcaaaccgaggaacacacttagcaagcttgtgtctgaccaaaacacggactcgatattgagacttaatcactatccaccatgtcctcttagcaataagaaaaccaatggtggtaagaatgtgattggttttggtgaacacacagatcctcaaatcatctctgtcttaagatctaacaacacttctggtctccaaattaatctaaatgatggctcatggatctctgtccctcccgatcacacttccttcttcttcaacgttggtgactctctccaggtgatgacaaatgggaggttcaagagcgtgaggcatagggttttagctaactgtaaaaaatctagggtttctatgatttacttcgctggaccttcattgactcagagaatcgctccgttgacatgtttgatagacaatgaggacgagaggttgtacgaggagtttacttggtctgaatacaaaaactctacctacaactctagattgtctgataataggcttcaacaattcgaaaggaagactataaaaaatctcctaaattga

SEQ ID NO: 76 - protein, 329 aa, Arabidopsis thalliana
MAVLSKPVAIPKSGFSLIPVIDMSDPESKHALVKACEDFGFFKVINHGVSAELVSVLEHETVDFFSLPKSEKTQVAGYPFGYGNSKIGRNGDVGWVEYLLMNANHDSGSGPLFPSLLKSPGTFRNALEEYTTSVRKMTFDVLEKITDGLGIKPRNTLSKLVSDQNTDSILRLNHYPPCPLSNKKTNGGKNVIGFGEHTDPQIISVLRSNNTSGLQINLNDGSWISVPPDHTSFFFNVGDSLQVMTNGRFKSVRHRVLANCKKSRVSMIYFAGPSLTQRIAPLTCLIDNEDERLYEEFTWSEYKNSTYNSRLSDNRLQQFERKTIKNLLN

SEQ ID NO: 77 - DNA, 975 bp, Helianthus annuus
atggtgactgtttcaaaacctattattgaacagtttcttgtgaaaccaaacacaagcccattagtcatcccagatatccctctcattgacctatcaaaacctgagtcaaaacaacatcttgttaaggcttgtcaagattttggattctttaaggtggttaatcatggtgttcctttaaagtttataaataaacttgaatcagaagctgtcaacttcttcaattctcctcttgccactaaagaaaagttcggcccacccgacccgtttggctatgggaacaaatgcattgggagaaatggggatgtgggttgggttgaataccttcttctcaacgccaaacccgaatccgattacccggaaaatttccagggcattgtgaatgattatgcaacatcagtgaaggcaatggcttgtgagattcttgaactattggcagatgaattgaaactacaacccagaaatgtgttcagcaagctgttgaaagatgaacagagtgactctgttttccgggtcaaccactatccaccatgcccagagtttcaagaaaaggaaagaaatgggtcgaaacttgtgggttttggagaacacacagacccacaaatcatctcggttttgcgatccaataacacttctgggcttgaaatttcattgagagatggaagctggatgtctgttcctcctgattctgaatctttcttcatcaatgttggtgattctttacaggtgatgaccaatggaagatttaagagtgtgaagcatagggtggtggccaatggtacaaagagtagggtgtcaatgatatactttggtggaccaccattgagtgaaaaaatagcaccattgccatcacttatgcaaggagaggaggacagtttgtacaaggaattcacttggttcgagtacaagaaatccgcgttcaattcaagattatctgataacagacttggcttgttcgaaaaaatcattgcgtcttag

SEQ ID NO: 78 - protein, 324 aa, Helianthus annuus
MVTVSKPIIEQFLVKPNTSPLVIPDIPLIDLSKPESKQHLVKACQDFGFFKVVNHGVPLKFINKLESEAVNFFNSPLATKEKFGPPDPFGYGNKCIGRNGDVGWVEYLLLNAKPESDYPENFQGIVNDYATSVKAMACEILELLADELKLQPRNVFSKLLKDEQSDSVFRVNHYPPCPEFQEKERNGSKLVGFGEHTDPQIISVLRSNNTSGLEISLRDGSWMSVPPDSESFFINVGDSLQVMTNGRFKSVKHRVVANGTKSRVSMIYFGGPPLSEKIAPLPSLMQGEEDSLYKEFTWFEYKKSAFNSRLSDNRLGLFEKIIAS

SEQ ID NO: 79 - DNA, 999 bp, Phaseolus coccineus
atggttgttctgtctcagccagcattgaaccagtttttccttctgaaaccattcaagtccacgcccttgttcacggggattcctgtggtcgacctcacgcaccccgatgccaagaatctcatagtgaacgcctgtagggacttcggcttcttcaagcttgtgaaccatggtgttccattggagttaatggccaatttagaaaacgaggccctcaggttctttaaaaaatctcagtccgagaaagacagagctggtccccccgaccctttcggctatggtagcaagaggattggcccaaacggtgatgtcggttgggtcgaatacctcctcctcaacaccaaccctgatgttatctcacccaaatcactttgcattttccgagaaaatcctcatcatttcagggcggtggtggagaactacattacagcagtgaagaacatgtgctatgcggtgttggaattgatggcggaggggttggggataaggcagaggaatacgttaagcaggttgctgaaggatgagaaaagtgattcgtgcttcaggttgaaccactacccgccttgccctgaggtgcaagcactgaaccggaatttggttgggtttggggagcacacagacccacagataatttctgtcttaagatctaacagcacatctggcttgcaaatctgtctcacagatggcacttgggtttcagtcccacctgatcagacttcctttttcatcaatgttggtgacgctctacaggtaatgactaatgggaggtttaaaagtgtaaagcatagggttttggctgacacaacgaagtcaaggttatcaatgatctactttggaggaccagcgttgagtgaaaatatagcacctttaccttcagtgatgttaaaaggagaggagtgtttgtacaaagagttcacatggtgtgaatacaagaaggctgcgtacacttcaaggctagctgataataggcttgcccctttccagaaatctgctgctgattaa

SEQ ID NO: 80 - protein, 332 aa, Phaseolus coccineus
MVVLSQPALNQFFLLKPFKSTPLFTGIPVVDLTHPDAKNLIVNACRDFGFFKLVNHGVPLELMANLENEALRFFKKSQSEKDRAGPPDPFGYGSKRIGPNGDVGWVEYLLLNTNPDVISPKSLCIFRENPHHFRAVVENYITAVKNMCYAVLELMAEGLGIRQRNTLSRLLKDEKSDSCFRLNHYPPCPEVQALNRNLVGFGEHTDPQIISVLRSNSTSGLQICLTDGTWVSVPPDQTSFFINVGDALQVMTNGRFKSVKHRVLADTTKSRLSMIYFGGPALSENIAPLPSVMLKGEECLYKEFTWCEYKKAAYTSRLADNRLAPFQKSAAD

SEQ ID NO: 81 - DNA, 993 bp, Sorghum bicolor
atggtggtgctcgccaacccgcctgtcgtcgaccagatcccgctgctgcggtccccggggcccagggacaccttctcgggcgtgccggtcgtcgacctgtccagccccgccgcggcgcgcgcgatcgtcgacgcctgcgagcgcttcggcttcttcaaggtcgtcaaccacggcgtgcccgcggccaccatgggcagggccgagtccgaggccgtcaggttcttcgcgcaggcgcaggccgacaaggaccgcgccggcccggcgtacccgttcggctacggcagcaagcggatcgggctcaatggcgacatggggtggctcgagtacctcctcctcgccgtcgactccgcgtcgctctccgacgcctgccccgtcccctccaccgccgccttccggagcgcgctgaacgagtacgtcgcggcggtgcggaaggtggcggtgcgcgtgctggaggcgatggcggaaggcctgggcattgcggacgcggccgcgctgagctcgatggtgaccggcgccggcggcgaccaggtgttccgcgtgaaccactacccgccgtgcccggcgctgcagggcctgggctgcagcgccacgggcttcggcgagcacaccgacccgcagctcatctccgtgctccgctccaacggcacgtccggcctgcagatcgcgctccgcgacggcgcgcagtgggtgtccgtgccctccgaccgcgacgccttcttcgttaacgtcggcgactcgttgcaggtgctgacgaacgggaggttcaagagcgtgaagcaccgggtggtgaccaacagcctcaagtctagggtttccttcatctacttcgcgggaccggcgctggagcagcggatcgtgccgctgccggagctgctggcggagggcgaggagagcctgtacaaggagttcacgtggggcgagtacaagaaggccgcgtacaagacgaggctcggggacaacaggctggcccagtttgagaagcgtagcatctag

SEQ ID NO: 82 - protein, 330 aa, Sorghum bicolor
MVVLANPPVVDQIPLLRSPGPRDTFSGVPVVDLSSPAAARAIVDACERFGFFKVVNHGVPAATMGRAESEAVRFFAQAQADKDRAGPAYPFGYGSKRIGLNGDMGWLEYLLLAVDSASLSDACPVPSTAAFRSALNEYVAAVRKVAVRVLEAMAEGLGIADAAALSSMVTGAGGDQVFRVNHYPPCPALQGLGCSATGFGEHTDPQLISVLRSNGTSGLQIALRDGAQWVSVPSDRDAFFVNVGDSLQVLTNGRFKSVKHRVVTNSLKSRVSFIYFAGPALEQRIVPLPELLAEGEESLYKEFTWGEYKKAAYKTRLGDNRLAQFEKRSI

SEQ ID NO: 83 - DNA, 1017 bp, Zea mays
atggtggtcctcaccaagggcgagctggagcagatcgcgctgccggccgtgcagcgcgcatcgccgccgccgccggccgccgtgccggaggtcgacctggcagccggggacgccgccgccgcgcgcgcggtggccaaggcgtgcgaggaccacggcttcttcaaggtgacgggccacggcgtgccgcagcacctcctggcgcgcctcgaggccgccgcggccgcgttcttcgcgctcccgcagcgggagaaggacagggccgccggctgcccgttcggatacgccagcaagcggattggcgccaacggcgatctcggctgggtcgagtacctcctgcttgccgtcaccgccgccggcgcagcggccgcgccggtgtctgcgtgcgagggcgcggagccgccctgtttccgtgctgtgctggacgagtacgtggcggcggtgaggcgcatgacctgcacggtgctgcagctgatggcgcaggggctgggcctcgacgacagggacgtgttcagccggctggtgctggaccgggacagcgactccatgctgagggtgaaccactacccgccgcggccccagccagcggcggcggcggagacgaggcggctgacggggttcggcgagcacaccgacccgcagatcatctccgtcctccgctccaacgacgcgtccggcctcgagatcacgctgcgggacggcacctgggtgtccgtgccctccgacacggaatccttcttcgtcaatgtcggcgacgcgttgcaggtgctgaccaacgggcggttccggagcgtgcggcaccgggtgatggtgagcagcgcgcggccgcgggtgtcggtgatcttcttcggcggcccgccgccgcgggagcgcctggcgccgctgccgggtctggtggaccgggagggcggccgacgccgctacagggagttcacgtggagggagtacaagaactcggcgtaccggaccaagctggcagacaacaggctctgctccttcgagaccatggcgacgagctag

SEQ ID NO: 84 - protein, 338 aa, Zea mays
MVVLTKGELEQIALPAVQRASPPPPAAVPEVDLAAGDAAAARAVAKACEDHGFFKVTGHGVPQHLLARLEAAAAAFFALPQREKDRAAGCPFGYASKRIGANGDLGWVEYLLLAVTAAGAAAAPVSACEGAEPPCFRAVLDEYVAAVRRMTCTVLQLMAQGLGLDDRDVFSRLVLDRDSDSMLRVNHYPPRPQPAAAAETRRLTGFGEHTDPQIISVLRSNDASGLEITLRDGTWVSVPSDTESFFVNVGDALQVLTNGRFRSVRHRVMVSSARPRVSVIFFGGPPPRERLAPLPGLVDREGGRRRYREFTWREYKNSAYRTKLADNRLCSFETMATS

SEQ ID NO: 85 - DNA, 1038 bp, Medicago truncatula
atggtagtaccttctccaacttccatgataagaactaagaaaacaaaggccgtgggaattccgacaattgacctttccatggaaaggtcagagttgtcggaattagttgtgaaagcttgcgaagaatatggtttttttaaggtggtgaatcatggtataccaaaggaggttatttcaaggttggaaaatgaaggaacagagtttttctcaaaaaactctacagagaaacttcaagctggtacttctactccttttggttatggctgcaaaaatattggtcccaatggtgataaaggtgaccttgagtatcttctccttcacaccaatcctaattcaatctctgagagatccaaaaccattgcaaaagatcaccctatcaagttcagttgcatcgtcactgattatatagaagcagttaaagaattagcatgtgagattcttgagctagcagcagaaggattgtgggtccctgacaagtcctcactaagcaaagttatcaaagacgttcatagtgactcagtccttaggatcaatcactaccctccagtgaagaaattaagcaaagataatttggacccatcaaaattccaaaacaataataatactattggatttggagagcattctgaccctcagatcctaaccatcttacggtccaacaacgtaggtggccttcagatttcaactcaacatggattgtggatccctgtccatcctgaccccaatgaattctatgtcatggttggagattctcttcaggttttgacaaatgggaggtttgtgagtgtgagacatagagtattgacaaacacaacaaagcccagaatgtcaatgatgtactttgcagcaccaccgttgaattggtggatcagtccattatcaaagatggtgacagcccataacccatctctgtataagccctttacatgggcccaatataaacaagcagcatatgctcttcgattgggagattcacgtcttgatcaattcaagctccaaaaacaagaagacaatacccattatcaccatgacacttga

SEQ ID NO: 86 - protein, 345 aa, Medicago truncatula
MVVPSPTSMIRTKKTKAVGIPTIDLSMERSELSELVVKACEEYGFFKVVNHGIPKEVISRLENEGTEFFSKNSTEKLQAGTSTPFGYGCKNIGPNGDKGDLEYLLLHTNPNSISERSKTIAKDHPIKFSCIVTDYIEAVKELACEILELAAEGLWVPDKSSLSKVIKDVHSDSVLRINHYPPVKKLSKDNLDPSKFQNNNNTIGFGEHSDPQILTILRSNNVGGLQISTQHGLWIPVHPDPNEFYVMVGDSLQVLTNGRFVSVRHRVLTNTTKPRMSMMYFAAPPLNWWISPLSKMVTAHNPSLYKPFTWAQYKQAAYALRLGDSRLDQFKLQKQEDNTHYHHDT

SEQ ID NO: 87 - DNA, 1050 bp, Arabidopsis thalliana
atgagctctgtcacacagctattcaagaacaaccccgtgaaccgtgaccggatcatcccactagatttcaccaacaccaaaaccctacccgactcccacgtctggtccaaacccgaacccgaaaccacgagcggacccattcccgtcatcagcttgtccaacccggaggaacatgggctactacgacaagcctgtgaggaatggggtgtgtttcatatcacagaccatggagtctcacactcgttactccataacgttgattgccaaatgaagaggcttttctctttacccatgcatcgtaagatcttagccgttcgatctcccgacgagtccactggttacggtgtggttcggatctccatgttctatgataagctcatgtggtctgaaggattctccgtcatgggttcctctcttcgacgtcacgctacactcttatggcccgatgatcatgccgagttctgcaatgtgatggaagagtatcagaaggcaatggatgatttaagtcatagactaataagcatgttgatgggctcgttagggctaacacatgaagatttgggatggcttgtaccagacaaaactggttcaggaactgactcgatccaatcctttctgcagttgaactcctacccggtttgccctgaccctcatctagctatgggtttagcccctcacaccgactcctccctacttaccattctctaccaaggcaatattccaggtctagagattgaaagtccacaagaagaagggtcgagatggattggagtagagccaatagaaggtagtctcgttgttataatgggagatttatctcatatcatatccaatggacagttcagaagtacaatgcaccgtgcggtggtgaacaagacgcaccaccgtgtctcagccgcttatttcgctggccctcccaagaaccttcagatcggaccgttgaccagcgacaagaaccatcctcctatttacaggcgtttgatatgggaagagtaccttgcagccaaagcaacacactttaacaaagccttgactttgttccgttgctga

SEQ ID NO: 88 - protein, 349 aa, Arabidopsis thalliana
MSSVTQLFKNNPVNRDRIIPLDFTNTKTLPDSHVWSKPEPETTSGPIPVISLSNPEEHGLLRQACEEWGVFHITDHGVSHSLLHNVDCQMKRLFSLPMHRKILAVRSPDESTGYGVVRISMFYDKLMWSEGFSVMGSSLRRHATLLWPDDHAEFCNVMEEYQKAMDDLSHRLISMLMGSLGLTHEDLGWLVPDKTGSGTDSIQSFLQLNSYPVCPDPHLAMGLAPHTDSSLLTILYQGNIPGLEIESPQEEGSRWIGVEPIEGSLVVIMGDLSHIISNGQFRSTMHRAVVNKTHHRVSAAYFAGPPKNLQIGPLTSDKNHPPIYRRLIWEEYLAAKATHFNKALTLFRC

SEQ ID NO: 89 - DNA, 1023 bp, Phaseolus coccineus
atggaaactctaaatgatgcctacaaagcacaccctctggaccttggcgatatcatccccatagacttttcttcatctcctgccatacctgattcccacagctggtctgaacccaatgataatcgtatctcatccgatgatcctcctcccgtcatagacctcttggatcccaaagccaaagacctcataagccttgcatgtcagaactcgggtgcttttcagttgaccaatcatggcatacccttaggtgttattcaagctgctgaagaagaagtcgaacacctcttctctctccctactgaacaaaagatgaaggctcttagaactcccgatggtgctactggttatggcagagctcgaatttcccccttcttccccaagggtatgtggcacgaaggattcaccatcattggatctatctctcaggatgtcaaaaagatttggcccgatgaccatgctaggttttgtgatagaatggaggattatgagaagaaaatgaagattctggcggagcgagtaacagagattctgtttgatttgttgaacgtttctgaggaaaaaaggaagtgggttgatgcagaagacaaaggaacagctattcagttgaatttctacccaagttgtcccgaaccaaaccgaaccatgggtttggctcctcacactgacacttctatcataacaattgttcaaagcccatccactgggctccaactctacaaggaagaaaaagggtggatctctgtgcagcctcaccctgaagctctcatcgttcacttgggagatctggcacacatcatatccaatggaagattctgcagcccccttcaccgcgtaacgcttagtgaaacttgcaaacgttactccattgcttatttctattctccacccatagatcatgttctgtctccctttgtcactgaggatgataaatctgctgctcagtttcgtcctgtcactgtgaaggagtacattgcgatcaaggctcagcattttggaaactccatctcttttgttaagatttga

SEQ ID NO: 90 - protein, 340 aa, Phaseolus coccineus
METLNDAYKAHPLDLGDIIPIDFSSSPAIPDSHSWSEPNDNRISSDDPPPVIDLLDPKAKDLISLACQNSGAFQLTNHGIPLGVIQAAEEEVEHLFSLPTEQKMKALRTPDGATGYGRARISPFFPKGMWHEGFTIIGSISQDVKKIWPDDHARFCDRMEDYEKKMKILAERVTEILFDLLNVSEEKRKWVDAEDKGTAIQLNFYPSCPEPNRTMGLAPHTDTSIITIVQSPSTGLQLYKEEKGWISVQPHPEALIVHLGDLAHIISNGRFCSPLHRVTLSETCKRYSIAYFYSPPIDHVLSPFVTEDDKSAAQFRPVTVKEYIAIKAQHFGNSISFVKI

SEQ ID NO: 91 - DNA, 1122 bp, Oryza sativa
atgccgacgccgtcgcacttgaagaacccgctctgcttcgacttccgggcggcgaggcgggtgccggagacgcacgcgtggccggggctggacgaccacccggtggtggacggcggcggcggcggcggcgaggacgcggtgccggtggtggacgtcggggcgggcgacgcggcggcgcgggtggcgcgggcggcggagcagtggggcgcgttccttctggtcgggcacggcgtgccggcggcgctgctgtcgcgcgtcgaggagcgcgtcgcccgcgtgttctccctgccggcgtcggagaagatgcgcgccgtccgcggccccggcgagccctgcggctacggctcgccgcccatctcctccttcttctccaagctcatgtggtccgagggctacaccttctccccttcctccctccgctccgagctccgccgcctctggcccaagtccggcgacgactacctcctcttctgtgacgtgatggaggagtttcacaaggagatgcggcggctagccgacgagttgctgaggttgttcttgagggcgctggggctcaccggcgaggaggtcgccggagtcgaggcggagaggaggatcggcgagaggatgacggcgacggtgcacctcaactggtacccgaggtgcccggagccgcggcgagcgctggggctcatcgcgcacacggactcgggcttcttcaccttcgtgctccagagcctcgtcccggggctgcagctgttccgtcgagggcccgaccggtgggtggcggtgccggcggtggcgggggccttcgtcgtcaacgtcggcgacctcttccacatcctcaccaacggccgcttccacagcgtctaccaccgcgccgtcgtgaaccgcgaccgcgaccgggtctcgctcggctacttcctcggcccgccgccggacgccgaggtggcgccgctgccggaggccgtgccggccggccggagccccgcctaccgcgctgtcacgtggccggagtacatggccgtccgcaagaaggccttcgccaccggcggctccgccctcaagatggtctccaccgacgccgccgccgccgccgacgaacacgacgacgtcgccgccgccgccgacgtccacgcataa

SEQ ID NO: 92 - protein, 373 aa, Oryza sativa
MPTPSHLKNPLCFDFRAARRVPETHAWPGLDDHPVVDGGGGGGEDAVPVVDVGAGDAAARVARAAEQWGAFLLVGHGVPAALLSRVEERVARVFSLPASEKMRAVRGPGEPCGYGSPPISSFFSKLMWSEGYTFSPSSLRSELRRLWPKSGDDYLLFCDVMEEFHKEMRRLADELLRLFLRALGLTGEEVAGVEAERRIGERMTATVHLNWYPRCPEPRRALGLIAHTDSGFFTFVLQSLVPGLQLFRRGPDRWVAVPAVAGAFVVNVGDLFHILTNGRFHSVYHRAVVNRDRDRVSLGYFLGPPPDAEVAPLPEAVPAGRSPAYRAVTWPEYMAVRKKAFATGGSALKMVSTDAAAAADEHDDVAAAADVHA

SEQ ID NO: 93 - DNA, 918 bp, Physcomitrella patens
atggctctattcgatgctgacgcccacaccgtgaagaagaacgttgagaagatggtgggtgcgtgcgagcaatggggctacttctatcttataaaccatggcgtggagttggagctcatgcagaaggtagagaaacaggcgtacgaattcttctcattgtcggccgctgaagaggtgaaacatccttcacaatgttccttgctggggaaaatcaagtggtggtctgggagagttgcagtgaaacctgctgaaaccgacttggatgagtacaacaaccagctctccttttcggagaacaaccatgaattctcgtacccccctgattacgaaactttgagtgctcttgacaggactgcagtgaaggagtatgacgttgttatgaagaagcttgctaagcgcatcgtgaagcttctcgtcgtgggtttaggggtgaaggcctggcggttcgatgatttcttagaaggagttgaagcttcattgagatggaattacatgccaccatgtccacgacctgagaatgcaatgggtctccgtcctcgcactgacccatacctcatcacgctgcagcacgatagcggagttggaaacttgcagatttatcgaaacggaaaatggcttggcgtcccgtttcgagcagatgctctgattgtcaacgttggcgacgtgtttgagattctgacaaacggcaagatcgcgagcccctcgcacaggatagtggtaaatgaggtggaagggcgtctatcagtagctcattgtctggcaccgtcaaagttggttacccttattccccctccagagattttaagatctgggcccaaccagtacaaggcgaggacctatgcggagtatctgggtgctagaaagaggctaggctcatccaactccctcgaattcatgaaactgccaaccagcgtgtga

SEQ ID NO: 94 - protein, 305 aa, Physcomitrella patens
MALFDADAHTVKKNVEKMVGACEQWGYFYLINHGVELELMQKVEKQAYEFFSLSAAEEVKHPSQCSLLGKIKWWSGRVAVKPAETDLDEYNNQLSFSENNHEFSYPPDYETLSALDRTAVKEYDVVMKKLAKRIVKLLVVGLGVKAWRFDDFLEGVEASLRWNYMPPCPRPENAMGLRPRTDPYLITLQHDSGVGNLQIYRNGKWLGVPFRADALIVNVGDVFEILTNGKIASPSHRIVVNEVEGRLSVAHCLAPSKLVTLIPPPEILRSGPNQYKARTYAEYLGARKRLGSSNSLEFMKLPTSV

SEQ ID NO: 95 - DNA, 975 bp, Arabidopsis thalliana
atgtctgaacttcattcttctctgcagcttcctgtgttagacttaacacaaccaattgagtcctctatactgtcttctctctctgaggcttgtaaagagtggggattcttctatgtcaccaatcatggaatctctaaagagatgttcagcaaaatttgttccttgtccagagatgttttcaaagctcctcttgaatcaaagctcaagcttggtcccatttcatatactcctcggtacatcgcctctccttatttcgaaagccttgttgtctctggacctgatttctctgattctgccaaagcttcagcagatgttttgttccaagatcatcataaaccagagttaagagaaacaatgcaagaatacggagctaaaatggcagaattgtccaaaagactcataaagattctcttgatgatgactttaggagatgaaaccggaaagagactctaccaaactgactttagcaactgtcatggatacttaaggctagtgaactacacacctccacacgacgtggagaagcaagaagagctcgttgaaggtctcgggatgcacactgatatgagctgcataacaatagtctatcaagattccgttggtgggcttcagatgaggtctaaagaagggaaatggatcgatataaacccgtgcaacgatttccttgttgttaatattggagaccttatgcaagcatggagtaatggacggctgagatcatctgaacatcgagttgtattgagaaagttggtgaacagagtctctctggcgttttttctctgttttgaggatgagaaagtgatacttgcacctcaagaaattgtgggtgagggaaaacaaagaagctacaagtcgtttaagtgttcggagtacctgaagttcagacagagcaatgaagaagggaagtttgagaagattggtttcactgtcaaagactttgctggactaaagctggctcaaccagatgatccttag

SEQ ID NO: 96 - protein, 324 aa, Arabidopsis thalliana
MSELHSSLQLPVLDLTQPIESSILSSLSEACKEWGFFYVTNHGISKEMFSKICSLSRDVFKAPLESKLKLGPISYTPRYIASPYFESLVVSGPDFSDSAKASADVLFQDHHKPELRETMQEYGAKMAELSKRLIKILLMMTLGDETGKRLYQTDFSNCHGYLRLVNYTPPHDVEKQEELVEGLGMHTDMSCITIVYQDSVGGLQMRSKEGKWIDINPCNDFLVVNIGDLMQAWSNGRLRSSEHRVVLRKLVNRVSLAFFLCFEDEKVILAPQEIVGEGKQRSYKSFKCSEYLKFRQSNEEGKFEKIGFTVKDFAGLKLAQPDDP

SEQ ID NO: 97 - DNA, 1071 bp, Arabidopsis thalliana
atggaggcggaaggagaaaaacagtggagttctctcatagtaccttttgttctagagatagtgaaagagaagaacttcacaactattcctccgaggtatgttcgggttgatcaagaaaaaactgagatcttaaatgattctagtcttagttctgagattccagtcatcgacatgacacggttgtgttctgtttccgccatggattccgagctcaagaagctggatttcgcttgccaagattggggattttttcaattggtaaaccatggaatagactcgtctttcttggaaaaactagagacagaagttcaagaattcttcaatctccctatgaaagagaagcagaagttgtggcagagaagtggtgaatttgaaggatttggacaagtgaacattgtctcggagaatcagaaactcgattggggagacatgtttatcctcaccactgaaccaattcgatcacgtaaatctcacttgttctccaaattacctcctcctttcagagaaactttagagacttactcctctgaagtgaagagcatagctaagattctgtttgcgaaaatggcgagtgttctagagatcaaacacgaagaaatggaagatttgtttgatgatgtttggcaatctatcaagattaattactacccgccatgtccacagccagatcaagttatgggtttgactcaacattcagacgctgcaggtctcacaatactcttacaggtgaatcaagtggaaggacttcagatcaagaaagacggcaagtgggttgtcgtaaaacctcttcgagatgctttagttgttaatgttggcgaaatcttagagatcataacaaacgggagatatcgaagcatcgagcatagagcggtggtgaattcagagaaagagaggttatcggttgcgatgtttcatagtcccggaaaggagacaatcattcgtcctgcgaaaagccttgtagataggcagaagcaatgtttgttcaaaagtatgagcacacaagagtactttgatgccttctttactcaaaaactcaatgggaaatctcaccttgatcttatgcgtatttaa

SEQ ID NO: 98 - protein, 356 aa, Arabidopsis thalliana
MEAEGEKQWSSLIVPFVLEIVKEKNFTTIPPRYVRVDQEKTEILNDSSLSSEIPVIDMTRLCSVSAMDSELKKLDFACQDWGFFQLVNHGIDSSFLEKLETEVQEFFNLPMKEKQKLWQRSGEFEGFGQVNIVSENQKLDWGDMFILTTEPIRSRKSHLFSKLPPPFRETLETYSSEVKSIAKILFAKMASVLEIKHEEMEDLFDDVWQSIKINYYPPCPQPDQVMGLTQHSDAAGLTILLQVNQVEGLQIKKDGKWVVVKPLRDALVVNVGEILEIITNGRYRSIEHRAVVNSEKERLSVAMFHSPGKETIIRPAKSLVDRQKQCLFKSMSTQEYFDAFFTQKLNGKSHLDLMRI

SEQ ID NO: 99 - DNA, 1056 bp, Helianthus annuus
atggaaaacaacaagataaactttggtagatcactaattgtaccaagtgttcaacaacttgctaaggggcctagcacccacatcccacctcggtatgtgcaccatgatcaccgccctgcatccgatgatgcacgggtcccatcggtgccggtcgttgatcttcactggttgctttctgggtcttgttctgagcttcataagcttcatacagcttctaaagaatgggggtttttccaggttataaatcatggaataagtgagtccatattagaggatttcaagactgaagtcttgaacatgttcaaccttccaatggaggagaaactgaagctttggcaggaagaagacaaccacgaaggtttcgggcagctgtttgtcgtatccgaggaccagaagcttgactggtcagacatgttttacctaactacccttccacatgatctcaggcaatcccaactctttcagaagctacctctcaccctcagggagaagttagaagcttacactatggaaatgaaaagggtggcagtggcaatattgggtcaaatggctaaggctctagggatggactcagaggaaataaatgagttgtttcaggatggtgtgcaatcagtgagaatgaattattatcccccatgtccccagcccgaaatggcgctgggattatcgcctcattcggatgcagatgctttaacaatcctctaccagctaaatgaaaccgcgggcctccaaattcgcaaagatggaaattgggtaacggttaaacctcgaccagatgcgttggtagtcaacgttggagacataatggagattgtaagtaatggtgtgtacaagagcatagagcatcgagcgacagtgaactcaaacaatgagaggatgtcggtagcaacattctacagctcaagtatgggtacggagttaggccctgcgagaagccttgttgcacaacataatgtagcaaatttccggcgagtacccatagagacatactttaaggaattttttgctagaaagcttgatggtaaatcatacttggattttatgaagcttgattaa

SEQ ID NO: 100 - protein, 351 aa, Helianthus annuus
MENNKINFGRSLIVPSVQQLAKGPSTHIPPRYVHHDHRPASDDARVPSVPVVDLHWLLSGSCSELHKLHTASKEWGFFQVINHGISESILEDFKTEVLNMFNLPMEEKLKLWQEEDNHEGFGQLFVVSEDQKLDWSDMFYLTTLPHDLRQSQLFQKLPLTLREKLEAYTMEMKRVAVAILGQMAKALGMDSEEINELFQDGVQSVRMNYYPPCPQPEMALGLSPHSDADALTILYQLNETAGLQIRKDGNWVTVKPRPDALVVNVGDIMEIVSNGVYKSIEHRATVNSNNERMSVATFYSSSMGTELGPARSLVAQHNVANFRRVPIETYFKEFFARKLDGKSYLDFMKLD

SEQ ID NO: 101 - DNA, 1080 bp, Solanum lycorpersicum
atgagagacatagaagtcaagtacatggaagttccttctgtacaggaactggccaagaagaaactcgtgtcgattccatcgcgatacgtacgcgatgatcaagaccgttcaattgcatcatcaatttataaagaagtcccagtaattgatatgcaacgattgatcaactttaatgatcatgactccatgaatcttgagcttaacaagttgcacttagcagctaaagattggggtttctttcagttgattaatcatggagttagttgttcagtagtggagaagatgaaagacgagactcaaaaattcttcgatctgccattagaagagaagaaaaagtttgaaaaatcttcaggagatacagatggatttggacagctattcgtcgtctctgatgaacaaaagcttgactgggctgatctcttttacttgaagacttcacccacatatttgcgaaagcctgtgttttccaagctttacctttcacttagagagacgattgaagagtacgcggatgaaataaagaagctaagcatgagagtattggaaacgttgggtaaagctttggggattgatgaagatgaagtgaagagtgttttcaaagaaggaatgcaatcgatgaggatgaattactatccaccatgtccacaaccagagaaagtgatgggacttactcctcattcagatgcaacaggccttacaatacttcttcaagttaatgaaactcaaggtcttcaaattaaaaaagatggaatttggatccccattgaaccactccctaatgccttcatagtcaatgttggagatgcttttgagattttctcaaatggaatatacaaaagcatagaacatagatcagtggtgagctcagaaaaagaaaggatttcagtagcaacatttcagagtccaagattggatggtatattaggtccatcaagtagccttgttacacctcaaaatccaccaaaattcaaaaaaattggagtcactcaattttataaaggatttttcacacgtgaacttgatgggaaatcatatgtggacaccatgagaatcaccaatgtagatgatctaaacaattag

SEQ ID NO: 102 - protein, 359 aa, Solanum lycorpersicum
MRDIEVKYMEVPSVQELAKKKLVSIPSRYVRDDQDRSIASSIYKEVPVIDMQRLINFNDHDSMNLELNKLHLAAKDWGFFQLINHGVSCSVVEKMKDETQKFFDLPLEEKKKFEKSSGDTDGFGQLFVVSDEQKLDWADLFYLKTSPTYLRKPVFSKLYLSLRETIEEYADEIKKLSMRVLETLGKALGIDEDEVKSVFKEGMQSMRMNYYPPCPQPEKVMGLTPHSDATGLTILLQVNETQGLQIKKDGIWIPIEPLPNAFIVNVGDAFEIFSNGIYKSIEHRSVVSSEKERISVATFQSPRLDGILGPSSSLVTPQNPPKFKKIGVTQFYKGFFTRELDGKSYVDTMRITNVDDLNN

SEQ ID NO: 103 - DNA, 1098 bp, Populus trichocarpa
atggcatcctcgaagtcagatagcttagatgttcattctgtaattagtgttatggagctcgtcaaagagcccataatctcagtccccaaagaatatgttcacatggatcaacaaaacccaaccttttctgttcgcactgatcatccccttccaactcttcccaccattgatttcaagctgttggtctcggtggataccacggatttggagctagaaaagttgcactccacttgcaaagaatggggtttctttcagttggtgaaccatggcgttagctcatcactgctggagcagctgaaacatgagattgaagaattttataatcttccattggaagataaaaggaaatacatggtaaggccagatgattttcaagggtatggcaataccaaattagatgagatacttgactggggtgatagattctatatgattaccaatcctattcatcacaggaagccacatcttttcccagagctcccaccatcattcaggaatctcttggaatgttatctgctggaattgcaaagacttgccatgaaactgcttgggtttatagcagaagctctgaaagtggacttgaaggagattggggagatttttgatgatgggttacaatcagtgagaatgacatgctatcccccatgcccacagccagaacttgttgtaggcttcagacctcactcagacgccactggcatcaccatacttaatcaagtcaatggtgtagatggtcttcagataaaaagagatggggtttggattccggtgaaattcatcccagatgctcttgtagtaaatgtgggagacattctagagattctgagcaacggtgtctataaaagcattgagcacagggccacgacaaattccaaggaagaaaggctctctatggctttttttgtcagccccaaattcgaggcagaggttggtcctttgactagtttaatcagcccacaaaatccaccattatttcgaagaatagggatggaaaaatatgtcaaagacttcttctcccgcaagctccaagggaaatcattcttggaggacatgaaaattgaaggagctgaagaggctacactgcttgatggcaattga

SEQ ID NO: 104 - protein, 365 aa, Populus trichocarpa
MASSKSDSLDVHSVISVMELVKEPIISVPKEYVHMDQQNPTFSVRTDHPLPTLPTIDFKLLVSVDTTDLELEKLHSTCKEWGFFQLVNHGVSSSLLEQLKHEIEEFYNLPLEDKRKYMVRPDDFQGYGNTKLDEILDWGDRFYMITNPIHHRKPHLFPELPPSFRNLLECYLLELQRLAMKLLGFIAEALKVDLKEIGEIFDDGLQSVRMTCYPPCPQPELVVGFRPHSDATGITILNQVNGVDGLQIKRDGVWIPVKFIPDALVVNVGDILEILSNGVYKSIEHRATTNSKEERLSMAFFVSPKFEAEVGPLTSLISPQNPPLFRRIGMEKYVKDFFSRKLQGKSFLEDMKIEGAEEATLLDGN

SEQ ID NO: 105 - DNA, 1053 bp, Oryza sativa
atgtctctacaggtgccaaatgtgcaggaactcgcactgacttgcaaccgacctgaccagcagatacctgacaggtacatcaggccggaggctggcaccgaagaggtcatctgcggccaaggcatcaacacggcaatcccggtcatcgatctcgccaagctgctcaacccgcagtcatcccaagaggagtgtgccaagctgcgatctgcatgtcagcactggggtttcttccagctcgtcaaccatggggtgcctgacgatgtgatcagcgacgtgaggagagacttaactgagttcttcaagctaccacttgaagccaaggaggcgtacgctaaaccaccagacaagtacgaaggctatggccagcacttcgtcgtttcagagaagcagaagctggactggggagacctgctacacctccggcttcgcccaaccgagtccagggatttgaggttctggcctgcccatccttcatctttcaggaattccatggagaggtactccttggagacggcaaaagtagcacgctgcctgttggagttcttggccatggacatgggcgttgatccggagtctctcctggaggtattcagaggccagccccagaacatgagggtgaactactacccgccgtgcaggcaaaccggcaaggtgctcggcctgtcgccgcactgcgacgcgaccagcctgacgctgctgctccatgtgaacgacatgcagggcctccagatcaggaaggacggcaagtggctcaccatcgaagccctcgacggcgcgttcgtcgtcaacgtcggcgacatgcttgagattctgagcaatgggaggtacaggagcgttgagcacagggccgtggtgcacccggagaaggagcgcatctcggcggcggtgttccaccaggcgtgccgggacgcgacggtcgggcctctgccggagctcgtgacgaaggacggtggcaggccggtgtacaagtcgatggcctacgaggatttcatgaagcgcttcttctcggccaaacttgacggaagggctaacgtcgagggcatgaagatttag

SEQ ID NO: 106 - protein, 350 aa, Oryza sativa
MSLQVPNVQELALTCNRPDQQIPDRYIRPEAGTEEVICGQGINTAIPVIDLAKLLNPQSSQEECAKLRSACQHWGFFQLVNHGVPDDVISDVRRDLTEFFKLPLEAKEAYAKPPDKYEGYGQHFVVSEKQKLDWGDLLHLRLRPTESRDLRFWPAHPSSFRNSMERYSLETAKVARCLLEFLAMDMGVDPESLLEVFRGQPQNMRVNYYPPCRQTGKVLGLSPHCDATSLTLLLHVNDMQGLQIRKDGKWLTIEALDGAFVVNVGDMLEILSNGRYRSVEHRAVVHPEKERISAAVFHQACRDATVGPLPELVTKDGGRPVYKSMAYEDFMKRFFSAKLDGRANVEGMKI

SEQ ID NO: 107 - DNA, 1065 bp, Triticum aestivum
atggcagagtccttcgacaagatgaaggtggagttcacgggccatgaagagagcgtgcaggccctcgcagaggccttccacgactccggcgaggtccccgagaggtacatcaggccggagatcgatgccgatcccctggccgccgatgcggggggtcatgctctgccgacgatcgacatgtccaggctgctcgaccccgagttctcggcggaggagtccgctaagctcggatccgcctgcgagcactggggcttcttccagctcgtgaaccatggcgtggacggggggctgctggggcagacgaaggccgacgtcgccgagttcttcggccttcccccggaggagaagtcggccgtggcgatcccgcccaacggcatgcagggcttcggccaccacttcgtcttctccaaggagcagaagctggactgggtggacctgctgttcctcgccaccaggcccgcccaggagcgaggcctggacttctggcccaccaagccctccaccttcagggacacgcttgacaagtacacgacggagctagcaagtgtagccgaacagctgttcaggttcatggccaaggacctgggaattgaccaggaggcgctccttggcaccttcaagggcctgccccagtgcgtgaggatcaactactaccctccctgccggcaagccggcaaggtgctgggcctctcgccgcacaccgacggcgttggcatgacgctactcctccatgccaacgacgtgcaagggctgcaggtcaggaaggatggggaatggttctccgtggacgccctgcccggagctctcgtcgtcaacatcggcgacgtccttgagatcctcagcaatggcaagtacaggagcatcgagcaccgggcggtggttaaccctgacaaggagaggatcaccattgcggcgttccacagcgtgcaccttccctgcacgattggcccgtttcaggagctgggtgacgcacgctataagacggtcgatggccttgacttcaccaaggggtacttcgcggcgaagctggaaggcaggaggtacctggagagcttgaagctatag

SEQ ID NO: 108 - protein, 354 aa, Triticum aestivum
MAESFDKMKVEFTGHEESVQALAEAFHDSGEVPERYIRPEIDADPLAADAGGHALPTIDMSRLLDPEFSAEESAKLGSACEHWGFFQLVNHGVDGGLLGQTKADVAEFFGLPPEEKSAVAIPPNGMQGFGHHFVFSKEQKLDWVDLLFLATRPAQERGLDFWPTKPSTFRDTLDKYTTELASVAEQLFRFMAKDLGIDQEALLGTFKGLPQCVRINYYPPCRQAGKVLGLSPHTDGVGMTLLLHANDVQGLQVRKDGEWFSVDALPGALVVNIGDVLEILSNGKYRSIEHRAVVNPDKERITIAAFHSVHLPCTIGPFQELGDARYKTVDGLDFTKGYFAAKLEGRRYLESLKL

SEQ ID NO: 109 - DNA, 1095 bp, Zea mays
atggacgccaagccgcgcaacctgggcggctcgctgccggtgcccaacgtgcaggacctggccgcgcgccccggcgacgaactcacgccgcccgtgctaagccgctacctccgcgacgacgtcgacggcgcagacgccaacggcgacgcggcctcctcggtgccggtagttgacctcgcgaggctcctggacccgtcgtcgcacggagacgaggagtccgccaaactgaaggcggcctgcgaggagtggggcttcttccaggtgatcaaccacggggtgcccgacgcggtggtcgcggacgtgaaggcagacctgcaggccttcttccgcctcccgctcgccgacaagcgcgcggtggcgcaggagcccggcgggatcgaggggtacgggcaggccttcgtggtctccgaggaccagaagctggactgggccgacatgcttttcctgtccacgcagccgcccgagtaccgggccccgcgcttctggccggcgcgcccggccacgttcggggactcgctggcgcgctactctgccgaggtgcagcgcgtggccgcccgcctgctggcgtccatggccgcgaacctgggcgtggcggacgccgcgaggctggccagggtcgccgacgcgcaggccgtgcgcgtcaactactacccggcgtgcccgcacggcaggggcagggtgctgggcctgtcgccgcactcggacgccgccggcctcacgctgctgctccaggtcagcgccgtcccggggctgcagatcaggaggcgcggcgcgtggatcagcgtcgaccccatccccggagcgctggtggccaacgtcggcgacgtcgtcgaggtgctcaccaacggcaggtacaagagcatcgagcaccgggcgctggttagccccacccaccaccgggtgtccgtcgcagccttccactccgccaggttcggcgacacttacgcgccgcttgaggagacgattgtcgatggtgatgagccagcgaggtacaggagcattggcgtcgaggactacgtccgcctggtgctgtctagtaagctccaaggaaagaacataatggacgccatgaagatcaatccggtcactgaatga

SEQ ID NO: 110 - protein, 364 aa, Zea mays
MDAKPRNLGGSLPVPNVQDLAARPGDELTPPVLSRYLRDDVDGADANGDAASSVPVVDLARLLDPSSHGDEESAKLKAACEEWGFFQVINHGVPDAVVADVKADLQAFFRLPLADKRAVAQEPGGIEGYGQAFVVSEDQKLDWADMLFLSTQPPEYRAPRFWPARPATFGDSLARYSAEVQRVAARLLASMAANLGVADAARLARVADAQAVRVNYYPACPHGRGRVLGLSPHSDAAGLTLLLQVSAVPGLQIRRRGAWISVDPIPGALVANVGDVVEVLTNGRYKSIEHRALVSPTHHRVSVAAFHSARFGDTYAPLEETIVDGDEPARYRSIGVEDYVRLVLSSKLQGKNIMDAMKINPVTE

SEQ ID NO: 111 - DNA, 1080 bp, Sorghum bicolor
atggagacggaggttccgagcagcaccggaagcagatggtcacgggtggcttcatccctccctgtcaggaacgtgcaagacctcgcggcatgtcctgaagagatgacagcccagaatctcgaaaggtacatccggccggacattggagttcttgttgagaaatccagcgaggttcccgtgatcgaccttggcaagctcttcaatccccgttttgtggaagaggaggctgctcgcctcaggtttgcttgtgaggattggggattttttcagcttgtaaatcatggaatagcagacgagataatcacaaatataagaagtgacattcagagtttcttccaacttcccttggaggtgaagtgtgcctatgcacaggttccaggaagccttcaaggctatggccaatcgtttgttgtgtcggaaggtcaaaaacttgactggtgtgacaggttttccatcatagcccaaccgcctcaggcccgtgatatgaaatattggcctactcaacctcgtactttcaggaaatctattaatgactactcttctgagttgatgaaaattattggttctgttgttcacttcattgctaaagcattaaatattgatctcaaactgatggacgacaaatatgtgtctcaagttttgaggatgaattactaccctccatgcatgaccatggctgaaaaggtattgggcttgtcaccacattcagatgcatcttttctaactatccttttagaaattaattcagttgaaggccttcaaattaaaaggcacaatgcatggatcacagtgaaaccaaatcctaaagcattgctggtgaatgtgggtgactttcttgagattatgtcaaatggaaagtacaagagtgttgaacacagggtgacaataaatgccaatcaagaacggttaaccatatcagcatttcattttccatcacttgatggagtagttgcacctatgacaaccattacagaagagaggatcctgtacaagacaatgggagtagaagagtatttaaaaatctttatgtcaaacaaactggaaggcaagagcgcattggatcatgcaaagttatcataa

SEQ ID NO: 112 - protein, 359 aa, Sorghum bicolor
METEVPSSTGSRWSRVASSLPVRNVQDLAACPEEMTAQNLERYIRPDIGVLVEKSSEVPVIDLGKLFNPRFVEEEAARLRFACEDWGFFQLVNHGIADEIITNIRSDIQSFFQLPLEVKCAYAQVPGSLQGYGQSFVVSEGQKLDWCDRFSIIAQPPQARDMKYWPTQPRTFRKSINDYSSELMKIIGSVVHFIAKALNIDLKLMDDKYVSQVLRMNYYPPCMTMAEKVLGLSPHSDASFLTILLEINSVEGLQIKRHNAWITVKPNPKALLVNVGDFLEIMSNGKYKSVEHRVTINANQERLTISAFHFPSLDGVVAPMTTITEERILYKTMGVEEYLKIFMSNKLEGKSALDHAKLS

SEQ ID NO: 113 - DNA, 1227 bp, Zea mays
atggccacctcacataaagactcgatcgacgatgcagggcaagacgagatcatcttggttcgcaagcaaaccaagataggccaggtcgtctcgttggttgttgcattggaggagcgagcaggtgccatggcagccgctgagatcaagataggccaggtcgacgacgtccaggagctgcaccggacgggcctgcagacggtgccggaccggtacatcagggacggcgacgaccggccggacggcgacaacgtctgcgctgtcgcgcacatcccggtgatcgacgtcgccgagctccagcgcgacgacgtcgggcttgacaagctcaggctcgcctgcgaggagtggggcttcttccaggttgtgaaccatggcatcgcgcacgagctgctggacgagatggagaggctggcgagggagttcttcatgctcccgctggaggagaaggagaagtaccccatggcgccgggcgggatccaggggtacggccacgcgttcgtcttctccgaggaccagaagctggactggtgcaacatgctggcgctgggcgtggagccggcgtccatccggcagccgaggctgtggccgacggccccggccgggttcggggagaccctggagacctactccgcggaggtcggggagctctgccggaggctgctcgcgcgcatcgccgagacgctgggcctggcgccggccacgttcgccgacatgttcggcgaggcggtgcaggcggtgcggatgaacttctacccgccgtgcccgcgcccggacctggtcatggggctcagcgcgcactcggacggcagcgccgtaacggtgctccagcaggacgcgggctgcgccggcctgcaggtgcgcggcaagggcggcgcctgggtacccgtgcaccccgtcccgcacgccctcgtcgtcaacatcggcgacaccctagaggttctgacgaacggcaggtacaagagcgtggagcaccgtgcggtggccaacggcgagcaggaccggctgtcggtggtgacgttctacgcgccggcctacgacgtcgagctgggaccgctgccggagttcgtcaccgacgaggcgccgtgccggtaccggaggttcaaccacggcgagtacagccgccactacgtcaccagcaggctcgagggcaagaagacgctcgagttcgccaagattgatccgctggccggagagcacgacggcacagctcccgaggaaacctctacctag

SEQ ID NO: 114 - protein, 408 aa, Zea mays
MATSHKDSIDDAGQDEIILVRKQTKIGQVVSLVVALEERAGAMAAAEIKIGQVDDVQELHRTGLQTVPDRYIRDGDDRPDGDNVCAVAHIPVIDVAELQRDDVGLDKLRLACEEWGFFQVVNHGIAHELLDEMERLAREFFMLPLEEKEKYPMAPGGIQGYGHAFVFSEDQKLDWCNMLALGVEPASIRQPRLWPTAPAGFGETLETYSAEVGELCRRLLARIAETLGLAPATFADMFGEAVQAVRMNFYPPCPRPDLVMGLSAHSDGSAVTVLQQDAGCAGLQVRGKGGAWVPVHPVPHALVVNIGDTLEVLTNGRYKSVEHRAVANGEQDRLSVVTFYAPAYDVELGPLPEFVTDEAPCRYRRFNHGEYSRHYVTSRLEGKKTLEFAKIDPLAGEHDGTAPEETST

SEQ ID NO: 115 - DNA, 1062 bp, Populus trichocarpa
atggctgataatctttttcctaccaaaatagaatcaaaatcaaaatctgtccaagagttggtcatgaacaacgaagaacctcctggaaattatttctatgaagatggtgttaatggagtcctagaccgttctcttccagtgttggagatgccagttattgatataagccgcctcacatctccgtcaacaagcagagaggaagttgaaaaactccactcagctctcatctcatgtggctgctttatgtcaataaatcatggaatcactggtgtattcttggaccaagtacgttcagttactgcgcagttctttgcacttccaatggaagagaagttgaagtactccagagcagttgatagcacagaaggttatggaaatgacatgatcctttcagaagatcaaatacttgattggacagacagattatatcttatagtaagcccagaagatcagcgacagttcaaattttggcctgaaaaacctgaaatttttagggaaattttgcaagaatataccacaaagttaaaggtgatagttgaagttgttctcaaagccatggcaaggtcattaaacttggaagacaactgctttctggacaagtacggagaaagggcattaatgcaggccagattcaacttctttcctccctgtccgaggcctgaccgatctcttggcctgaaaccacacgcagatggatcagcaatcaccatcgtcctgcaagacaaagaagtcgaagggcttcagttccttaaagatgatcaatggtttagagttcctatccagcttcctcatgctcttcttattaatgttggtgatcaatcagaggtaatgagcaatgggtttttcaagagcccagtccacagagtagtgacaaattcagaaagggagaggacttccgtggctgtgttctgttctccagacccagacaacgacattgaacctgtggatggggcagtcagtgagacgaggccgagattatacaagaaggtgcaagattatgtcagcaagtactttcagtactatcaggaagggaagaggccaatagaagcagtgaaaatttaa

SEQ ID NO: 116 - protein, 353 aa, Populus trichocarpa
MADNLFPTKIESKSKSVQELVMNNEEPPGNYFYEDGVNGVLDRSLPVLEMPVIDISRLTSPSTSREEVEKLHSALISCGCFMSINHGITGVFLDQVRSVTAQFFALPMEEKLKYSRAVDSTEGYGNDMILSEDQILDWTDRLYLIVSPEDQRQFKFWPEKPEIFREILQEYTTKLKVIVEVVLKAMARSLNLEDNCFLDKYGERALMQARFNFFPPCPRPDRSLGLKPHADGSAITIVLQDKEVEGLQFLKDDQWFRVPIQLPHALLINVGDQSEVMSNGFFKSPVHRVVTNSERERTSVAVFCSPDPDNDIEPVDGAVSETRPRLYKKVQDYVSKYFQYYQEGKRPIEAVKI

SEQ ID NO: 117 - DNA, 1065 bp, Medicago truncatula
atggaggtgtcggcagaggtaaagatagttggtaataaatcagttcaagagttggcattgaattctgaaaatcttccaccaaataattatatctataatgaaggtggtgttggatttcgtgatgctcttcttccttcagaatcagattttcaagttccaatcattgacattgccaacctcactttaccatctacagcacaacatgagcttcttaaacttcaatctgcacttcattcatgtggcttctttctggtgataaaccatgggatgacaagctcgtttcttgacaaagtgagggaagtttcaaagcaattttttgaacttccaaaggaagaaaagcaaaaatatgcaagggaaccaaacaatgttgaaggatatggtaatgatacaatatattcagaaaatcaaaggcttgattggtgtgacagattatttttgaaggtacatcctgaagatcaaaggaatttcaaattttggcccctaaatcccattgatttcaggaataccatacaacaatataccgaatgtgtctggcagttatatgaagaaattttcagggccatggcgaagttactgaacttggaagaggattgtttcctaaaggaatgtggagagaggggtacaatgtctatgagaaccaattactaccctccatgtcctatggctgatcatgctctggggctgaagccacattctgattcatcatctataacttttttgctgcaagataataaggtagaaggcctccaagttctcaaagacaaccagtggtttaaagttccaataatccatgatgctattgtgattaatgttggtgatctaatggagataatgagcaatgggatttttcagagtccaatacacagagcagtggtaaatgaagaaaaggcaaggctctcagtagctatgttatgccgcccagattcggagaaagagattcaaccgattgacaaactagtgaacgagtcaaggccattatcatacagaccagtaaaagattattgtacaaaatatctccagtactaccaacaaggaaaaaggccaattgatgctttcaaactctaa

SEQ ID NO: 118 - protein, 354 aa, Medicago truncatula
MEVSAEVKIVGNKSVQELALNSENLPPNNYIYNEGGVGFRDALLPSESDFQVPIIDIANLTLPSTAQHELLKLQSALHSCGFFLVINHGMTSSFLDKVREVSKQFFELPKEEKQKYAREPNNVEGYGNDTIYSENQRLDWCDRLFLKVHPEDQRNFKFWPLNPIDFRNTIQQYTECVWQLYEEIFRAMAKLLNLEEDCFLKECGERGTMSMRTNYYPPCPMADHALGLKPHSDSSSITFLLQDNKVEGLQVLKDNQWFKVPIIHDAIVINVGDLMEIMSNGIFQSPIHRAVVNEEKARLSVAMLCRPDSEKEIQPIDKLVNESRPLSYRPVKDYCTKYLQYYQQGKRPIDAFKL

SEQ ID NO: 119 - DNA, 1056 bp, Glycine max
atggctggcaatataatagcttcatcagtgcccaagagcgtccaagaaatgtccatggatggtgatgaaccaccatcaagatatgtagttaatggaaatagctttggacctaaagattcttctgtacagtttccaatacccatcattgatgtgcgtctcctctcatcagaagatgagctagagaagcttagatctgctctaagttcagctggatgcttccaggcaattggtcatggaatgtcaagttcatatcttgacaatatacgagaaactgcaaaacaattttttgcactcccagaagaggaaaagcagaagtatgctcgagctgttaatgaatctgaagggtatggaaatgacagagtagtttcagacaaacaggtccttgactggtcctatcgcctaacacttcgagtttttccagaaacaaaacgaaggctttctctttggccaaaaattcctactgattttagtgagaaattagaggagttttctacgaaagtgaaatcaatgatggaatatctcttgagatgcatggcgaggtcactgaatttggaagagggtagcttcgtggaccagtttggggaacaaccgttgatgctagcgaggttcaacttctatccactttgttctagacctgatttggttcttggcgtcaaacctcatacagatagatcaggaatcacagtcctgttgcaagacaaagaagtggaaggtcttcaagttttgatagatgacaattggatcaatgtccccacaatgcctgatgctcttgttgtcaaccttggcgatcaaatgcagatcatgagtaatggaatattcaagagcataatgcacagggttgtgaccaatacagaaaagctgaggatgtctgtagcaatgtttaatgagccagaggccgagaacgagattggacctgtagaaggtctaatagatgagtcacggccaaggttatacagaaacgttaaaaattatggtgatatcaactacaagtgttatcaagagggaaagattgcactagagactgtcaaaattgcagataactctaatcagaggtga

SEQ ID NO: 120 - protein, 351 aa, Glycine max
MAGNIIASSVPKSVQEMSMDGDEPPSRYVVNGNSFGPKDSSVQFPIPIIDVRLLSSEDELEKLRSALSSAGCFQAIGHGMSSSYLDNIRETAKQFFALPEEEKQKYARAVNESEGYGNDRVVSDKQVLDWSYRLTLRVFPETKRRLSLWPKIPTDFSEKLEEFSTKVKSMMEYLLRCMARSLNLEEGSFVDQFGEQPLMLARFNFYPLCSRPDLVLGVKPHTDRSGITVLLQDKEVEGLQVLIDDNWINVPTMPDALVVNLGDQMQIMSNGIFKSIMHRVVTNTEKLRMSVAMFNEPEAENEIGPVEGLIDESRPRLYRNVKNYGDINYKCYQEGKIALETVKIADNSNQR

SEQ ID NO: 121 - DNA, 1068 bp, Sorghum bicolor
atggcggatgaatcatggaggattcctatgttagtgcaagaactggcggccaaggtgcagcaaccaccaagcaggtacgtgcagccggagcagtatcatcctgtcagcctagatgttggtgccgagacgccggaacccatccctgtaatcgacctcagccggctgtcggctgctgctgatgccgctggtgagagtggcaagctccggttagccctgcagagctggggactcttcctggtcgctaaccatggcatagaaaccgatttgatggatgatttaattgatgcatcgagggagtttttccatcttccgcttgaagagaaacaaaaatgcagcaacttgatagacggcaagtatttccaggtggaaggatatggaaatgacccagtcagatccaaagatcaaaaccttgactggttagatcgactgcatctcagggtagaaccagaagatgagaggaatctcgtccattggcctgaacatccgaaaactttccgggctcttttacatgagtacacattgaactgcaagagaatcaaagattgtatccttcggacaacagccaagactttaggacttagcgaagattactttgtggcacaatttagcaacaaggctcccatttttgcaagatttaactactacccaccgtgtccaagaccggatcttgtctttggcgtcaaacctcactcagacagtggtgttcttaccattcttctcatagacaaagatgttggtggactgcaagttcttagagatggtgtgtggcacaatgttccaacgagtccttacaggttgctgattaacataggagactacgtggagataattagcaatgggatcttcaagagcccagtgcacagggcggtcaccaacacggagaaagagaggatctcattggccatgttccatggcctggatcctgagaaagagattgagccggcagctgctctgttaaatgagaagcaaccggcacggtacaggacactgaaagccaaggagtacctggctgggttctatgaacatttctgcaaaggaactagattcatcgagtctgtgaagatataa

SEQ ID NO: 122 - protein, 355 aa, Sorghum bicolor
MADESWRIPMLVQELAAKVQQPPSRYVQPEQYHPVSLDVGAETPEPIPVIDLSRLSAAADAAGESGKLRLALQSWGLFLVANHGIETDLMDDLIDASREFFHLPLEEKQKCSNLIDGKYFQVEGYGNDPVRSKDQNLDWLDRLHLRVEPEDERNLVHWPEHPKTFRALLHEYTLNCKRIKDCILRTTAKTLGLSEDYFVAQFSNKAPIFARFNYYPPCPRPDLVFGVKPHSDSGVLTILLIDKDVGGLQVLRDGVWHNVPTSPYRLLINIGDYVEIISNGIFKSPVHRAVTNTEKERISLAMFHGLDPEKEIEPAAALLNEKQPARYRTLKAKEYLAGFYEHFCKGTRFIESVKI

SEQ ID NO: 123 - DNA, 1050 bp, Arabidopsis thalliana
atggcaacttctgcaatatctaagctcttagtgtctgatttcgcctcctccgttcacatcccttcaaactatgtccgaccaatctccgaccgtccgaacttgtccgaggtcgagagttctggcgattccatccctctgatcgatctccgggacctccatggacctaatcgagccgtaattgtccaacaacttgctagtgcgtgttccacttatggtttctttcagatcaagaatcatggagtaccagatacaaccgtcaataaaatgcaaaccgttgcgagagagttcttccatcaacccgagagcgaaagagtcaaacactactccgcagatccaacaaagacaacgagactctccaccagtttcaacgtcggcgcagacaaagtcttgaactggagagacttccttagactccattgctttcccatagaagatttcatcgaagaatggccatctagtcccatctctttcagagaagtcacagctgaatatgccacgagcgtaagagctttggttttgagacttcttgaggccatctcagagagtttaggccttgaaagcgaccatataagcaatatattaggcaaacacgctcaacacatggcgtttaactactatccgccgtgtccagaacccgagctaacttacggacttcccggacataaagacccaaccgttatcactgtccttcttcaagaccaagtctctggtttgcaagtctttaaggatgataaatgggtcgctgttagtccaattcccaacactttcatcgtcaatatcggcgaccaaatgcaggtcataagcaatgataaatacaagagtgtgctccatagagccgtagtaaacaccgagaacgagcggttatcgattccgactttctatttcccttcaacagatgcagtgattggtccagcacacgagctggtcaatgaacaagactctcttgccatttacagaacctacccgtttgttgagtattgggacaagttttggaacagatcacttgctactgcgagctgtctagacgccttcaaagctccaacaacctaa

SEQ ID NO: 124 - protein, 349 aa, Arabidopsis thalliana
MATSAISKLLVSDFASSVHIPSNYVRPISDRPNLSEVESSGDSIPLIDLRDLHGPNRAVIVQQLASACSTYGFFQIKNHGVPDTTVNKMQTVAREFFHQPESERVKHYSADPTKTTRLSTSFNVGADKVLNWRDFLRLHCFPIEDFIEEWPSSPISFREVTAEYATSVRALVLRLLEAISESLGLESDHISNILGKHAQHMAFNYYPPCPEPELTYGLPGHKDPTVITVLLQDQVSGLQVFKDDKWVAVSPIPNTFIVNIGDQMQVISNDKYKSVLHRAVVNTENERLSIPTFYFPSTDAVIGPAHELVNEQDSLAIYRTYPFVEYWDKFWNRSLATASCLDAFKAPTT

SEQ ID NO: 125 - DNA, 1053 bp, Populus trichocarpa
atggctcctactatattgccacaagctggtgatcaccttgcttcagctggggccaacaaagctccgtacacctacactgatcccctttcagaggttccaactctctctggtgttgatgtatcagctgatggctctacccctatcatcgacatggaagcccttctcggtcctcaccgatctgagatcatcaaacagattggccgtgcatgcgagaaaaacggcttttttgcggtgaagaaccatggaattccagaaatgaagatcaacagcatgctgggcacggcaagagagttcttccacttgccggatgaagaaaggttgaaatttcgctctactgacccgaacagtgtcatcaggctggtcacgggctttcaagacaagacccggaatatctttgtctcgaggcaatccttgaaattccactcgcatcccgttgaagaatacaagagccaatggccttcaaatcctccttctttcagggaaaatgttggagaatattgtgcaagtgtgagagaggtggaggtagcaatactcgaggccatatcagagagcttgggcctggaaagggattacatagacaagatattgaaaggacattatgtgtccattaattactatccagcttgccaggaatcagaacttgatgttacttatggagttcggactcacactgatccaactataatcactattctgatgcaagatgatgtgcctggacttcaggttattaatgatgacaagtggataaatgttaatcctcttccaaacgccgttgttgttcatgttggagatatcctgcaggcacttagtaactacagatacaagagtttgcttcatcaagctatagtgaactgtgagaaagagcgtgtatccattgccagttattgctatccatcggatgatgctatgataggacctgctaagaagctggtaggcaaggatcatccagcaatctataaagatttcacttacagagaattccacgaatccatgtggcgagtaaagtgttcaacagctaagcgattagacttgttcaaggctcgtgctgattaa

SEQ ID NO: 126 - protein, 350 aa, Populus trichocarpa
MAPTILPQAGDHLASAGANKAPYTYTDPLSEVPTLSGVDVSADGSTPIIDMEALLGPHRSEIIKQIGRACEKNGFFAVKNHGIPEMKINSMLGTAREFFHLPDEERLKFRSTDPNSVIRLVTGFQDKTRNIFVSRQSLKFHSHPVEEYKSQWPSNPPSFRENVGEYCASVREVEVAILEAISESLGLERDYIDKILKGHYVSINYYPACQESELDVTYGVRTHTDPTIITILMQDDVPGLQVINDDKWINVNPLPNAVVVHVGDILQALSNYRYKSLLHQAIVNCEKERVSIASYCYPSDDAMIGPAKKLVGKDHPAIYKDFTYREFHESMWRVKCSTAKRLDLFKARAD

SEQ ID NO: 127 - DNA, 1056 bp, Medicago truncatula
atggaccaacatggtgattgcacttcttcatttaatagtgctatgagtctaagtgatcaaggagtctcttctatacctcaatgttatattcttcctccatcgcaacgccctggtacttatgatcatgtttccatctccaccactcttcccattatagacttgtctaatttaagggaacaatctcttagatctcaaacgatcaacgaaattcgaattgcttgcaaggagtttggtgtctttcaggtaattaaccatggaattgatgagtctacaatgaaagatgctctacaagttgcaacagaattcttcaacctccctaatgatgaaaaaatgcgcttattttctgatgatgttcacaaacctgtaagatatggaacaagtcttaatcaagccaaggatgaagttttttgctggagagatttcatcaaacattactctcatccaatagcagattggattcatatgtggccttcaaatccatccacttatagggagaagatgggaaagtatgcagtggcagcacaagttttacaaaacaaattaatggaaataatatttgaaagcctaggattaaaccaaagttacttgcatgaagaaataaatggagggtcacaagtagtagcagtgaactgctaccctacatgtcctgaaccaggactcaccttaggaatccatcctcattcagattatggttccataacactgcttctacaaactcgttcagggctagaaattgaagacaaaaacaaaaattggattcctgttccttttgttgatggagcattggttgtgcaattaggggatcaaatggaagttcttagcaatggacaatataagagtgtgattcatagagcaattgttaatgaagatgagaaaagattttctattgtgagtcttcatagtcttgctatggataaaaagataggtcctgcacttgaacttgttgatgatcaacaccctatgtcttacaaggagtttagctttagggaatttcttgaattcctttgttgtaatgatgtttcaaagggaaggtttcttgatactttgaaactatga

SEQ ID NO: 128 - protein, 351 aa, Medicago truncatula
MDQHGDCTSSFNSAMSLSDQGVSSIPQCYILPPSQRPGTYDHVSISTTLPIIDLSNLREQSLRSQTINEIRIACKEFGVFQVINHGIDESTMKDALQVATEFFNLPNDEKMRLFSDDVHKPVRYGTSLNQAKDEVFCWRDFIKHYSHPIADWIHMWPSNPSTYREKMGKYAVAAQVLQNKLMEIIFESLGLNQSYLHEEINGGSQVVAVNCYPTCPEPGLTLGIHPHSDYGSITLLLQTRSGLEIEDKNKNWIPVPFVDGALVVQLGDQMEVLSNGQYKSVIHRAIVNEDEKRFSIVSLHSLAMDKKIGPALELVDDQHPMSYKEFSFREFLEFLCCNDVSKGRFLDTLKL

SEQ ID NO: 129 - DNA, 1062 bp, Physcomitrella patens
atgtctaatgcacgagtgaccttgcaagagctggtcgagaatggccatctcaacacagttcctgacgacttcttggtttctgaggaggatcgggtgaagttggaggatggctcctgtagtcttgagctgcctgtcatcgacatggctgggatagagggagagcgccgcggtcttgtagtgcagcagatccgaagtgcttgtaaagagtggggattctttcaagtgaaggaccacggcgtgcctttgtcgttgatgaagaagatgcagcaggagctccgccagttcttcgatctttcttacgaggaaaagagcaagattcgggcgaaaactgtaggagattctcttccagatgagggctacagtgatagaatgagccacaaagagggcagaagttccaattggagtgataaattgcgtctgtacacgttgcctgtttctgggcgtcgatacgagctgtggcccacgcatcctccaagtttcagagaaacagtggaagcctatgcagaggaaacagacaagctgatgagacgaatcttggagctcatctctgatagcctcgagttggaaacctctcacctcaatgactacttctccggaaaataccagcaagtgtatcaagtgaattactacccttcctgtccacagccggacgtcaccatgggactgaggaagcattcggacaacaatgtgctcactcttgtgttgcaagatggcaatccaggattgcaagtgaggaaggatggacaatggatcactgtgaagcccgtggagggatggttcgttgtaaacgttgcagatcaaattgagcttttgagcaatgggagatatagaagtgtcgagcaccgtgtgtttgtaagttcaaagcctcgcatttcacttgctacgttccatgccccaacgaacgacactgtcgttggtcccattccagagttgctcggtccgaaggagcgtcccaggtacaaagcatgcttgttttcagagtttaaggagtcgttttattatgccggctgggcgaaagcccttactggcaaagggcaccttgatcacttgctagtcgtttag

SEQ ID NO: 130 - protein, 353 aa, Physcomitrella patens
MSNARVTLQELVENGHLNTVPDDFLVSEEDRVKLEDGSCSLELPVIDMAGIEGERRGLVVQQIRSACKEWGFFQVKDHGVPLSLMKKMQQELRQFFDLSYEEKSKIRAKTVGDSLPDEGYSDRMSHKEGRSSNWSDKLRLYTLPVSGRRYELWPTHPPSFRETVEAYAEETDKLMRRILELISDSLELETSHLNDYFSGKYQQVYQVNYYPSCPQPDVTMGLRKHSDNNVLTLVLQDGNPGLQVRKDGQWITVKPVEGWFVVNVADQIELLSNGRYRSVEHRVFVSSKPRISLATFHAPTNDTVVGPIPELLGPKERPRYKACLFSEFKESFYYAGWAKALTGKGHLDHLLVV

SEQ ID NO: 131 - DNA, 1014 bp, Oryza sativa
atggttgcgccgtctcggctcccatcccatgaggagcaatccgccgccgccgcagccgacggctcggccacaccgtcccaaggaatccccgtcgtcgatctcggcgtcctcatcaacggcgcggccgacgagcggtcgcgggcgatccgcgacctaggcagggcatgcgaggattggggcttcttcatggtgactaaccatggggtgcccgaggctctccgagaagcaatcatggacgcctgcaaggagctgttcagattacctttggaggagaagaaagagtacatgcgtgccaagccgatggatcctatacggatcggtacaggtttctactctgtcgtcgacgccgtaccatgcaggagggactacctgaagatgttctctcatcctgaattccactgccccgaaaagcccgcaaagctgagggagattgcaacggagtacgcgacctgcacgagagccctgttgctggagctcaccaaggcgatctccgagagcctgggcctcgccggcggccgcctctctgaagcgctcaacctcgagtcctgcttccagatcttggtggggaaccattaccctgcgtgctctagaccggacgagcaggcgatgggattatcggctcactccgaccatggcctcctcaccctgctcttccagaacggcgtcgatggcctccaggtcaagcacgatggcgaatggctcctcgcgaagcccctcccgggctccttcttcgtcatcgccggcgatcagttggagattgtgaccaacggaaggtacaagggcgtgctccaccgcgcggtggtcggcggcgagcagtcgaggatgtcgttcgtgagcctgatcgggccgtgcatggacaccgtcgtcgagccgctgccggagatggcggcggacggccggggcctggagttccgggggatcaggtacagggactacatggagatgcagcagagcaacagcatcaacgagaagacggcgcttgacatcgttcgcgtgatgcatcaggccgggtga

SEQ ID NO: 132 - protein, 337 aa, Oryza sativa
MVAPSRLPSHEEQSAAAAADGSATPSQGIPVVDLGVLINGAADERSRAIRDLGRACEDWGFFMVTNHGVPEALREAIMDACKELFRLPLEEKKEYMRAKPMDPIRIGTGFYSVVDAVPCRRDYLKMFSHPEFHCPEKPAKLREIATEYATCTRALLLELTKAISESLGLAGGRLSEALNLESCFQILVGNHYPACSRPDEQAMGLSAHSDHGLLTLLFQNGVDGLQVKHDGEWLLAKPLPGSFFVIAGDQLEIVTNGRYKGVLHRAVVGGEQSRMSFVSLIGPCMDTVVEPLPEMAADGRGLEFRGIRYRDYMEMQQSNSINEKTALDIVRVMHQAG

SEQ ID NO: 133 - DNA, 1089 bp, Glycine max
atggcctctgcagcttccatttcctcatcacaaccagaagcaccaaaggttcatgcatctgatatttctagcatcaaagcctttgcagaatcaaagggagcctctctgatcccttacacctaccactccatcacagagcaccatgatgatgatgtagcagatgagcttgctgcttccatcccagtcatcgacttgtctctcctcacttcgcatgaccctcaaatccacgccaaagccgtgcaccaactcggcaaggcctgtgcagagtggagtttcttcatgctcacaaatcatggaattcccgagagcctggtggaggagttgatgaaaaagtctcgcgagtttcatgatttgccgatggaagaaaagaaggagtttggtaataaaggaccctttgaaccgatcaggcatggcaccagcttctgtccagaagcagagaatgttcattattggagagattatctcaaggccatcacgtttcctgaattcaacttcccctacaagccaccaggttacagggaagttgcttatgattacagcaaaaaaatcagaggtgtgacaaggaagttgcttgaaggaatatcagagagtttgggattagaatccaattccataatcgagtccactgattttgactctggccatcagctgtttgttgtgaacctgtatccaccatgtccacaaccgcaccttgctctggggctgccttctcattctgacgtaggtttattgaccttgctcacgcagaatggaattggagggcttcaggttaagcacaatggcaaatgggtcaatgtcaatccccttcccaactgcctaattgttttgctttcagatcaactcgaggttgtgagtaatgggaagtacgctagggtgatgcaccgagcaatactcaacaatgcagacactaggatcagtgttgtgctggcgaatggacctgcgctagataaggaaattggacctttgccggagctactgcagaattataagccattgttcagaagcattaaataccgagattacttccaaattcagcagaagtcacgattacaagataaaagtagcttggatgagattcgccttaactaa

SEQ ID NO: 134 - protein, 362 aa, Glycine max
MASAASISSSQPEAPKVHASDISSIKAFAESKGASLIPYTYHSITEHHDDDVADELAASIPVIDLSLLTSHDPQIHAKAVHQLGKACAEWSFFMLTNHGIPESLVEELMKKSREFHDLPMEEKKEFGNKGPFEPIRHGTSFCPEAENVHYWRDYLKAITFPEFNFPYKPPGYREVAYDYSKKIRGVTRKLLEGISESLGLESNSIIESTDFDSGHQLFVVNLYPPCPQPHLALGLPSHSDVGLLTLLTQNGIGGLQVKHNGKWVNVNPLPNCLIVLLSDQLEVVSNGKYARVMHRAILNNADTRISVVLANGPALDKEIGPLPELLQNYKPLFRSIKYRDYFQIQQKSRLQDKSSLDEIRLN

SEQ ID NO: 135 - DNA, 1056 bp, Solanum lycorpersicum
atgacaactccaataattaatcaaccatccattagtgttaaaacactttctgaatcaccaaatctcaaatttatcccttctaattatgttaacactaatatttatccccttgaatctgagccacatgatcattcaaactcaatccccaccgtcgatttttcgctactcaactccattgatcctcatcaaaggtctcaagctatcaacaatctcaataaagcttgtcgagaatggggatttttcatggtggtaaaccatgggatacaagaaagtttgatgaataaagtgattgatggtactcaaggatttttcaatttaagagaagaagagaagaaagaatttgaagggaaacatgttttggaccctataagatatggaacaagcttcaatacctctaaagagaaaactttcttttggagggactatcttaaggtctttgtgcatccaaagttccactctcctagcaaacccgatcgatacagtgatattatgtgggagtattgtgagaaagttagacaagtaacaaaagtattacttggaggaatatcacaaggtttaggacttgaagaatgttatctggaaaaaactctagaggtgaagtcaggatttcaaatttttatcgcgaattattaccctagttgtcctcagccagaacttgcacttggtatgccacctcattcagatcatggcctattaactctaattattcaaaaccaagttggaggattacaagttcaacatcaaggcaaatggattcatgtcaatgcccttcccaactcactcttggtcaataccggcgaccatctcgagatatttagtaatggaaagtacaaaagcaatatacacaaagtagtggtgaacaacacaagtccaagaatatcagtagctgttgctcatggaccatcactagaagcaattgtaagtccagcttctccattgatacaaagtgaaaccaattataccccaatgaagtacaaggattacatggagatgcaacaaagtaatcaacttcaccaaaaatccattttggaacaagtcaaaattaagaggaaatga

SEQ ID NO: 136 - protein, 351 aa, Solanum lycorpersicum
MTTPIINQPSISVKTLSESPNLKFIPSNYVNTNIYPLESEPHDHSNSIPTVDFSLLNSIDPHQRSQAINNLNKACREWGFFMVVNHGIQESLMNKVIDGTQGFFNLREEEKKEFEGKHVLDPIRYGTSFNTSKEKTFFWRDYLKVFVHPKFHSPSKPDRYSDIMWEYCEKVRQVTKVLLGGISQGLGLEECYLEKTLEVKSGFQIFIANYYPSCPQPELALGMPPHSDHGLLTLIIQNQVGGLQVQHQGKWIHVNALPNSLLVNTGDHLEIFSNGKYKSNIHKVVVNNTSPRISVAVAHGPSLEAIVSPASPLIQSETNYTPMKYKDYMEMQQSNQLHQKSILEQVKIKRK

SEQ ID NO: 137 - DNA, 1035 bp, Oryza sativa
atggctggcggcctcacctctccccccatccggcggtcctctcctcggtggagcctcgaatcggacaacgtcgaccagatcgacacgacaaggaggttgaggcagatgtggatcgaggcggccttcgtcgggccaccactgcggacgggtcgaggtggccgtcgtcgagctgctactgcacagatgctgaaccatggcatcgcgcacgagctgatggacgaggtggagcgggtgagcaaggcgcactacgccaactgccgggaggagaagttcaaggagttcgcgcggcggatgctggaggccggcgagaagggcgccgacgtgaagggcatcgactgggagagcaccttcttcgtccgccaccgccccgtctccaacctcgccgacctccccgacgtcgacgaccactacaggcaggtgatgaagcaatttgcgtcggagatcgagaagctctcggagagggtgctggacctgctgtgcgagaatctgggcctggagaagggttacctgaagaaggccttcgccgggtcgaacggcccaacgttcggcaccaaggtgagcagctacccgccgtgcccgcgccccgatctcgtcgacggcctccgcgcccacaccgacgccggtggcatcatcctgctgttccaggacgaccaggtgagcggcctccagctgctcaaggacggggagtgggtggacgtgccgcccatgcgccacgccatcgtcgccaacatcggcgaccagctggaggtgatcaccaacggcaggtacaagagcgtcatgcaccgcgtcctcacgcgccccgacggcaaccgcatgtccatcgcctccttctacaaccccggcgccgacgccgtcatcttcccggcgcccgcgctcgccgccgccgacgcggcggcggccgcctacccgaggttcgtgttcgaggactacatgaacctgtacgtgcgccacaagttcgaggccaaggagccacgcttcgaggccatgaagtccgccgccgaggtcgtccacgcggcgcccatcgccaccgcttga

SEQ ID NO: 138 - protein, 344 aa, Oryza sativa
MAGGLTSPPIRRSSPRWSLESDNVDQIDTTRRLRQMWIEAAFVGPPLRTGRGGRRRAATAQMLNHGIAHELMDEVERVSKAHYANCREEKFKEFARRMLEAGEKGADVKGIDWESTFFVRHRPVSNLADLPDVDDHYRQVMKQFASEIEKLSERVLDLLCENLGLEKGYLKKAFAGSNGPTFGTKVSSYPPCPRPDLVDGLRAHTDAGGIILLFQDDQVSGLQLLKDGEWVDVPPMRHAIVANIGDQLEVITNGRYKSVMHRVLTRPDGNRMSIASFYNPGADAVIFPAPALAAADAAAAAYPRFVFEDYMNLYVRHKFEAKEPRFEAMKSAAEVVHAAPIATA

SEQ ID NO: 139 - DNA, 960 bp, Actinidia deliciosa
atggaggctttcccagtcattgacatggagaaactcaatggtgaagagagagcaccaaccatggagaagataaaagatgcttgtgagaactggggcttttttgagttggtgaatcatggtatttcccatgagcttatggacactgtggagaggctaacaaaggagcactacaacaagtgcatggaacagagattcaaggaaatggtggcaaccaaaggcctagaggctgttcagtccgaaatcaacgatttggactgggaaagcaccttcttcttgcgccaccttccggtttctaacatctcagaaatcccagatctcgaacaagatcacaggaaggctatgaaggaatttgccgagaaactagaaaaactagcagagcagttactggacctgctatgtgagaacgttggactagagaaagggtacctgaagaaggctttctatggctccaagggtccaacctttggcaccaaggtcagcaactaccctccgtgtcctcggccagagctgatcaagggtctccgagcccacaccgacgccggtggcatcatcctcctcttccaagacaacaaggtcagcggactccaactgctcaaagatggcgaatggatcgatgtcccaccaatgaaacactccattgtgatcaacataggtgaccagcttgaggtaatcacaaatggcaagtacaagagcgtgatgcaccgtgtgattgctcagccggatggcaacagaatgtcaatagcttcattctacaatccagggagcgatgctgtcatgtatccagcacctgcactggtggacaaagaagaagatcagcaaaagcaagtttatccaaagttcgtgtttgaggactacatgaagctttatgccgggcttaagttccaggccaaggagccgcggtttgaagccatgaaggccatggaaaatgccgttaacttgggtccaattgcaacaatttga

SEQ ID NO: 140 - protein, 319 aa, Actinidia deliciosa
MEAFPVIDMEKLNGEERAPTMEKIKDACENWGFFELVNHGISHELMDTVERLTKEHYNKCMEQRFKEMVATKGLEAVQSEINDLDWESTFFLRHLPVSNISEIPDLEQDHRKAMKEFAEKLEKLAEQLLDLLCENVGLEKGYLKKAFYGSKGPTFGTKVSNYPPCPRPELIKGLRAHTDAGGIILLFQDNKVSGLQLLKDGEWIDVPPMKHSIVINIGDQLEVITNGKYKSVMHRVIAQPDGNRMSIASFYNPGSDAVMYPAPALVDKEEDQQKQVYPKFVFEDYMKLYAGLKFQAKEPRFEAMKAMENAVNLGPIATI

SEQ ID NO: 141 - DNA, 957 bp, Hevea brasiliensis
atggagttcccagtaattaaccttgagaagcttaatggtgaggagagagcttccaccatggctaagatcaaagatgcctgtgagaattggggattctttgagttgctggaccatggaatagagccagagttcttggacacagtggagagaatgacaaaaggtcattacaggaaatgcatggagcagagattcaaggaaatgatggccggcaaaggtcttgagaatgtccaaactgagatcaaagatttggactgggaaagcaccttctacctccgccatctccctgagtcaaacattgctcaagttcctgatctcgatgatgaatacaggaaggtgatgaaggagtttgcagcgaagttggagaagcttgcagaggagcttctggacctgttatgtgaaaatcttggactagagaaagggtatctcaagaaggccttctatgggtcaaggggtccaacctttgggaccaaggtgagcaactacccaccatgccccaagccagacctcatcaagggactcagagcccacacagacgctggtggtattatcttgctgtttcaggatgacaaggtcagtggccttcaactccttaaagatggccagtggattgatgtgccccctatgcgccactccattgttattaaccttggagaccagcttgaggtaattaccaatggcaagtacaagagtgttgagcacagagttgtggctcaaacagatggtaccaggatgtcaatagcttcattctacaaccctggaagtgatgcactcatctacccagcaccagctctggtggagaaagcagcagagcagaagaagctggtgtacccaaaatttgtttttgaagactacatgaagctttatgctgggttgaaattccaggccaaggaaccaagatttgaagccatgaaggctgtggaaagtaatgtcaatttgggtcctattgcaacagcttaa

SEQ ID NO: 142 - protein, 318 aa, Hevea brasiliensis
MEFPVINLEKLNGEERASTMAKIKDACENWGFFELLDHGIEPEFLDTVERMTKGHYRKCMEQRFKEMMAGKGLENVQTEIKDLDWESTFYLRHLPESNIAQVPDLDDEYRKVMKEFAAKLEKLAEELLDLLCENLGLEKGYLKKAFYGSRGPTFGTKVSNYPPCPKPDLIKGLRAHTDAGGIILLFQDDKVSGLQLLKDGQWIDVPPMRHSIVINLGDQLEVITNGKYKSVEHRVVAQTDGTRMSIASFYNPGSDALIYPAPALVEKAAEQKKLVYPKFVFEDYMKLYAGLKFQAKEPRFEAMKAVESNVNLGPIATA

SEQ ID NO: 143 - DNA, 948 bp, Phaseolus lunatus
atgagtaacttcccagtgatcaactttgagaggctcaatggtgaggagagaaaagacaccatggagaaaataaaagatgcttgtgaaaactggggattctttgagttggtgaatcatggcataccccatgacctattggacactgtggagaggttgactaaagagcactaccagaaatgtatggaagaaaggttcaaggaattaatggcaagcaaaggtctagaggctatccaaactgaggtcaaggatatggactgggagagcaccttccacttgcgtcacctccctgaatcaaacatctcagaggtccctgatctcgttgacgaatacaggaaggtgatgaaggattttgctttgaggttagaaaaactagcagaacagctgctggacttgttgtgtgagaatcttggtctagagaaagggtacctcaagaaagccttctatggatcaagaggaccaacttttggaaccaaggttgccaactaccctccatgccccaacccagagttggtgaagggtcttcgtccccacaccgatgccggtgggatcatccttctcttccaggatgacaaggtcagtggcttacagctgctcaaagatgaccagtgggtcgatgtaccccctatgcgccactccattgttgttaacattggtgatcagcttgaggtgatcaccaatggtaagtacaagagtgtggagcaccgtgtgatagcacaaactgatgggaccagaatgtccatagcctcattctacaaccctggcagcgatgctgtgatctaccctgctccagaattgttggagaaagaggcagaggagaaagcccagctctacccaaaatttgtgtttgaggactacatgaagctctatgctaagctgaagttccaggccaaggagccaagatttgaagcctttaaagcatcaaattttgatccaattgcaactgcttaa

SEQ ID NO: 144 - protein, 315 aa, Phaseolus lunatus
MSNFPVINFERLNGEERKDTMEKIKDACENWGFFELVNHGIPHDLLDTVERLTKEHYQKCMEERFKELMASKGLEAIQTEVKDMDWESTFHLRHLPESNISEVPDLVDEYRKVMKDFALRLEKLAEQLLDLLCENLGLEKGYLKKAFYGSRGPTFGTKVANYPPCPNPELVKGLRPHTDAGGIILLFQDDKVSGLQLLKDDQWVDVPPMRHSIVVNIGDQLEVITNGKYKSVEHRVIAQTDGTRMSIASFYNPGSDAVIYPAPELLEKEAEEKAQLYPKFVFEDYMKLYAKLKFQAKEPRFEAFKASNFDPIATA

SEQ ID NO: 145 - DNA, 954 bp, Gossypium hirsutum
atggctactttcccagtgatcaacttagagaagcttaatggtgatgagagatcaagaatcatggagcaaatcaaggatgcctgtgaaaactggggattttttgaggtgatgaaccatgggattccacatgattttatggacactgttgagagattaacgaaagaacattataagaaatgtatggaacaaaggtttaaagaactggtagcaagcaaggctcttgaaggacttgaggctgaagttacggatatggattgggaaagtacatttcacttgtgccatctccctgaatcaaacatggctgaaatcccagatctcagtgatgaatataggaaagtgatgaaggaatttgcagtgaaattggagaaactagcagaggagttgttggatttgttttgtgagaatattggattagagaaagggtatttgaaaaaggcgttttatggggcaaaaggtccaacctttggcaccaaagttagcaactatccaccatgtccgaccccagacaaaatcaagggactcagagcccatactgatgcaggtggcatcatcttgctgttccaagaccccgtcgtcggcggccttcagcttcttaaagacggcgagtgggtcgatgttccaccgctccgccactccatcgtcatcaacctcggtgatcagctcgaggtgatcaccaatggcaagtacaaaagtgtggagcaccgagtcatagcccaaaccgatggaactcggatgtctttagcttcattctacaaccccggcagcgacgctgtcatctatccggcgccggcgttggtggagaaagaagctgaggaaaagaacaaacaggtttaccccaaatttgtgtttgaagagtacatgaaactgtatgcaggactgaaattccaggccaaggaaccaaggtttgaagccatgaaagcgatggaagctactgctcccattgcaacagcttaa

SEQ ID NO: 146 - protein, 317 aa, Gossypium hirsutum
MATFPVINLEKLNGDERSRIMEQIKDACENWGFFEVMNHGIPHDFMDTVERLTKEHYKKCMEQRFKELVASKALEGLEAEVTDMDWESTFHLCHLPESNMAEIPDLSDEYRKVMKEFAVKLEKLAEELLDLFCENIGLEKGYLKKAFYGAKGPTFGTKVSNYPPCPTPDKIKGLRAHTDAGGIILLFQDPVVGGLQLLKDGEWVDVPPLRHSIVINLGDQLEVITNGKYKSVEHRVIAQTDGTRMSLASFYNPGSDAVIYPAPALVEKEAEEKNKQVYPKFVFEEYMKLYAGLKFQAKEPRFEAMKAMEATAPIATA

SEQ ID NO: 147 - DNA, 1134 bp, Oryza sativa
atggcgccggtggccacgacgttcctcccgacggcgtcgaacgaggcgacgctgcggccgtcgttcgtgcgcgacgaggacgagcgccccagggtggcgtacaaccagttcagcgacgcggtcccggtgatctcgctccaggggatcgacgaagcggcgcgggcggagatccgtgcccgcgtggccggcgcgtgcgaggagtggggcatcttccaggtggtggaccacggcgtggacgcggggctcgtcgccgacatggcgcgcctcgcccgcgacttcttcgcgctgccgccggaggacaagctccggttcgacatgtccggcggcaagaagggcggattcatcgtctccagccacctccagggtgaagcggtgaaagactggcgggagatcgtgacctacttctcgtacccggtgaagtcccgcgactactcgcggtggcccgacaagccggcggggtggcgcgcagtggtggagcagtacagcgagcggctcatgggcctcgcctgcaagctgctgggcgtgctctccgaggccatgggcctcgacaccaacgcgctggccgatgcctgcgtcgacatggaccagaaggttgtcgtcaacttctaccccaagtgcccccagcccgacctcacccttggcctcaagcgccacaccgaccccggtaccatcacgctcctcctccaggacctcgtcggcggcctccaggccacccgcgacgccggcaagacgtggatcaccgtccagcccatccccggctccttcgtcgtcaacctcggtgaccatgctcactatctgagcaatgggaggttcaagaacgcggatcaccaggcggtggtgaactccgactgctgccggctgtcgatcgcgacgttccagaacccggcgccggacgcgatggtgtacccgctggcggtgcgcgacggggaggagcccatactggaggagccgatcacgttcgcggagatgtaccggcgcaagatggcacgcgacctcgagctcgccaagctcaagaagaaggccaaggagcagcggcagctgcagcaggcggcgctgccgccgccgccgccgacgcaggtcgccgcggagttggcagcacagaagcccaagtctctcgacgagattcttgcctag

SEQ ID NO: 148 - protein, 377 aa, Oryza sativa
MAPVATTFLPTASNEATLRPSFVRDEDERPRVAYNQFSDAVPVISLQGIDEAARAEIRARVAGACEEWGIFQVVDHGVDAGLVADMARLARDFFALPPEDKLRFDMSGGKKGGFIVSSHLQGEAVKDWREIVTYFSYPVKSRDYSRWPDKPAGWRAVVEQYSERLMGLACKLLGVLSEAMGLDTNALADACVDMDQKVVVNFYPKCPQPDLTLGLKRHTDPGTITLLLQDLVGGLQATRDAGKTWITVQPIPGSFVVNLGDHAHYLSNGRFKNADHQAVVNSDCCRLSIATFQNPAPDAMVYPLAVRDGEEPILEEPITFAEMYRRKMARDLELAKLKKKAKEQRQLQQAALPPPPPTQVAAELAAQKPKSLDEILA

SEQ ID NO: 149 - DNA, 1107 bp, Aethusa cynapium
atggctccaacaactcttactgctttagcccaagagaaaactctaaattctaaatttgttcgagatgaagatgagcgtcccaaagttgcctacaatcaatttagcaacgaaattcctgtcatttctctagctggtattgatgatgattctggtgacaagagatcccagatttgtcgaaaaattgttgaggcttgtgaagactgggggattttccaggtggtcgaccatggtatcgatagccatttgatttctgaaatgactcgtcttgctcgagaattttttgccctgccagctgaggaaaaactccggtttgatatgactggtggtaagaaaggtggatttattgtctctagccatcttcagggtgaagcagtgcaggattggcgtgagatagtgacttttttttcgtacccagttccggcccgggactactcaagatggcctgataagccagagggatggaggtccgtcacggaggtgtacagtgagaagttgatggccctaggctgcaagttactggaagtgttatcagaggccatggggcttgaaaaagagactattacaaaggcgtgtgtggatatggatcagaaagtgatagtgaactactatcccaagtgtccccaacctgacttgacactgggactcaaaagacatacggatcctggtacaattacccttttgcttcaggatcaggttggtgggttacaggccaccagggacggtggaaaaacttggattactgttcagcctgtggagggagcttttgttgttaatttgggtgatcatggtcactacttgagcaatgggaggttcaagaatgctgaccaccaagcagtagtgaattccgactctagcagaatgtcaattgcaactttccagaacccggctccgaatgcgaccgtatatccattaaagattagggagggagagaaatcagtcatggaggaggccattacatttgctgagatgtacaggagaaagatgagcaaagatattgaggtggctaagctcaagaaattggctaaagaaaaactgttgcaagaccaagacacagagaaggccaagctgcagacgaaacccaagagcgcagatgaaatcttcgcttga

SEQ ID NO: 150 - protein, 368 aa, Aethusa cynapium
MAPTTLTALAQEKTLNSKFVRDEDERPKVAYNQFSNEIPVISLAGIDDDSGDKRSQICRKIVEACEDWGIFQVVDHGIDSHLISEMTRLAREFFALPAEEKLRFDMTGGKKGGFIVSSHLQGEAVQDWREIVTFFSYPVPARDYSRWPDKPEGWRSVTEVYSEKLMALGCKLLEVLSEAMGLEKETITKACVDMDQKVIVNYYPKCPQPDLTLGLKRHTDPGTITLLLQDQVGGLQATRDGGKTWITVQPVEGAFVVNLGDHGHYLSNGRFKNADHQAVVNSDSSRMSIATFQNPAPNATVYPLKIREGEKSVMEEAITFAEMYRRKMSKDIEVAKLKKLAKEKLLQDQDTEKAKLQTKPKSADEIFA

SEQ ID NO: 151 - DNA, 1107 bp, Ammi majus
atggctccaacaactctcactgccttagcccaagagaaaactctaaattctaaatttgttcgagatgaagatgagcgtcccaaaattgcctacaatcaattcagcgatgaaatccctgtcatttctctagctggtattgatgatgattctgatgacaagagatcccagatctgtcgaaaaattgttgaggcttgtgaaggctgggggattttccaggtggttgatcacggtattgacaccgatttgatttctgaaatgactcgtcttgctcgagagttctttgccttgccagctgaggaaaaactccgctttgatatgactggtggtaagaaaggtggattcattgtctctagtcatcttcagggtgaagcagtgcaggattggcgtgagatagtgacttatttttcgtacccagttccggcccgggactactcaagatggcctgataagccggagggatggaggtccgtcacggaggtgtacagtgacaagttgatggggctagcttgcaagttactggaagtgttatcagaggccatggggcttgaaaaagaggctctgacaaaggcatgtgttgatatggaccagaaagtaatagtgaattactatcccaagtgcccacaacctgatttgacactgggactcaaaagacatacggatcctggtacgattacacttttgctccaggatcaggttggtgggttacaagccaccagggacggtggcaaaacttggattactgttcagcctgtggagggagcttttgttgttaatttgggcgatcacggtcactatttaagcaatgggaggttcaaaaatgctgaccatcaagcagtggtgaattccaactctagcagaatgtcaattgcaactttccagaacccagctccgaatgcaacagtatatccattgaagattagggagggagagaaggcagttatggaggagccgatcacatttgctgagatgtacaagaggaagatgagcaaagatattgagatggctaagctcaagaaactggctaaagaaaaactgttgcaagagcaagaggcggagaaggccaagctgcagatgacacccaagagcgcagacgaaatcttcgcttga

SEQ ID NO: 152 - protein, 368 aa, Ammi majus
MAPTTLTALAQEKTLNSKFVRDEDERPKIAYNQFSDEIPVISLAGIDDDSDDKRSQICRKIVEACEGWGIFQVVDHGIDTDLISEMTRLAREFFALPAEEKLRFDMTGGKKGGFIVSSHLQGEAVQDWREIVTYFSYPVPARDYSRWPDKPEGWRSVTEVYSDKLMGLACKLLEVLSEAMGLEKEALTKACVDMDQKVIVNYYPKCPQPDLTLGLKRHTDPGTITLLLQDQVGGLQATRDGGKTWITVQPVEGAFVVNLGDHGHYLSNGRFKNADHQAVVNSNSSRMSIATFQNPAPNATVYPLKIREGEKAVMEEPITFAEMYKRKMSKDIEMAKLKKLAKEKLLQEQEAEKAKLQMTPKSADEIFA

SEQ ID NO: 153 - DNA, 1101 bp, Anethum graveolens
atggctccatcaactctcactgccttagcccaagagaaaactctcaattctaaatttgttcgggatgaagatgagcgtcccaaaattgcctacaatcagtttagcgacgaaatcccagtcatttctctagctggtattgattctgatgacaagagatccgagatttgtcgaaaaattgtcgaggcttgtgaggactgggggattttccaggtggttgatcacggtgttgatagcgatttgatttctgaaatgactcgtcttgctcgagaattttttgccttgccagctgaggaaaaactccggtttgatatgagtggtggtaagaaaggtggatttattgtctctagtcatcttcagggtgaagcagtgcaggattggcgtgagatagtgacttatttttcgtacccaattcaggcccgggactactcaagatggcctgataagccagagggatggaggtccatcacggaggtatacagtgagaaattgatggcgctagcttgcaagttactggaagtgctatcagaggccatggggctcgaaaaagagacaattacaaaggcgtgtgtagatatggatcagaaagtgatagtgaattactatcccaagtgcccacaacctgacttgacactgggactcaaaagacatacggatcctggtactattacccttttgcttcaagatcaggttggtgggttacaagccaccagagacggcggcaaaacttggattaccgttcagcctgtggagggagcttttgttgttaatttgggtgatcatggtcactatttaagcaatgggagattcaagaatgctgaccaccaagcagttgtgaattccaactctagcagaatgtcgattgcaactttccagaacccggctccgaatgcaacagtatatccattgaagattagggagggagagaaggcagttatggaggagcctattacatttgctgagatgtacaagaggaagatgagcaaagatattgagttagctaagctcaagaaattggctaaagataaactgttgcaggagcaggacgccgacaaggccaagctgcagactacacccaagaccgcagacgaaatcttcgcttga

SEQ ID NO: 154 - protein, 366 aa, Anethum graveolens
MAPSTLTALAQEKTLNSKFVRDEDERPKIAYNQFSDEIPVISLAGIDSDDKRSEICRKIVEACEDWGIFQVVDHGVDSDLISEMTRLAREFFALPAEEKLRFDMSGGKKGGFIVSSHLQGEAVQDWREIVTYFSYPIQARDYSRWPDKPEGWRSITEVYSEKLMALACKLLEVLSEAMGLEKETITKACVDMDQKVIVNYYPKCPQPDLTLGLKRHTDPGTITLLLQDQVGGLQATRDGGKTWITVQPVEGAFVVNLGDHGHYLSNGRFKNADHQAVVNSNSSRMSIATFQNPAPNATVYPLKIREGEKAVMEEPITFAEMYKRKMSKDIELAKLKKLAKDKLLQEQDADKAKLQTTPKTADEIFA

SEQ ID NO: 155 - DNA, 1128 bp, Glycine max
atggcaccaacagccaagactctgacttacctggcccaggagaaaaccctagaatcgagcttcgttcgggacgaggaggagcgtcccaaggttgcctacaacgaattcagcgacgagatcccagtgatttctcttgccggaatcgacgaggtggatggacgcagaagagagatttgtgagaagatcgtggaggcttgcgagaattggggtatattccaggttgttgatcacggtgtggatcaacaactcgtggccgagatgacccgtctcgccaaagagttctttgctttgccaccggacgagaagcttcgttttgatatgtccggcgccaaaaagggtggattcattgtctccagccatctccaaggggaatcggtgcaggactggagagaaatagtgacatacttttcgtacccaaaaagagagagggactattcaaggtggccagacacgccagaagggtggagatcggtgactgaggaatacagcgacaaagtaatgggtctagcttgcaagctcatggaggtgttgtccgaagcaatggggttagagaaagagggtttaagcaaagcatgtgttgacatggaccagaaggtggtggttaattactaccccaaatgccctcaacctgacctcactcttggcctgaagcgccacacggatccgggcactatcaccttgctgcttcaggaccaagtgggtggacttcaagccaccagggacaatggcaaaacatggatcaccgttcagcctgtggaggctgccttcgtcgtcaatcttggagatcatgctcattatctgagcaatggaaggttcaagaatgctgatcaccaagcggtggtgaactcaaaccatagccgtttgtccatagccacttttcaaaacccagcaccaaatgcaactgtttaccctctgaagataagagaaggagagaagcctgtgatggaggaaccaatcacttttgctgaaatgtacaggaggaagatgagcaaggacattgagattgcaaggatgaagaagctggctaaggaaaagcatttgcaggaccttgagaatgaaaagcatttgcaagaacttgatcagaaggcaaaacttgaggccaagcctttgaaggagattcttgcttaa

SEQ ID NO: 156 - protein, 375 aa, Glycine max
MAPTAKTLTYLAQEKTLESSFVRDEEERPKVAYNEFSDEIPVISLAGIDEVDGRRREICEKIVEACENWGIFQVVDHGVDQQLVAEMTRLAKEFFALPPDEKLRFDMSGAKKGGFIVSSHLQGESVQDWREIVTYFSYPKRERDYSRWPDTPEGWRSVTEEYSDKVMGLACKLMEVLSEAMGLEKEGLSKACVDMDQKVVVNYYPKCPQPDLTLGLKRHTDPGTITLLLQDQVGGLQATRDNGKTWITVQPVEAAFVVNLGDHAHYLSNGRFKNADHQAVVNSNHSRLSIATFQNPAPNATVYPLKIREGEKPVMEEPITFAEMYRRKMSKDIEIARMKKLAKEKHLQDLENEKHLQELDQKAKLEAKPLKEILA

SEQ ID NO: 157 - DNA, 1068 bp, Aethusa cynapium
atggctcctacaaccataactgcattatcccaggagaaatcactaaacttagactttgtcagggatgaagacgagcgtcccaaagttgcttacaatcagttcagcaatgaaattcccatcatttctctagctggtatggatgatgattctaatggcaggagacccgagatatgtcgtaaaatagtcgaggcattcgaagactggggaattttccaggtggttgatcacggtattgacaaaggtttgatttctcagatgtctcgtctctctcgtgaattctttgctttgcctgctgaggaaaaactccggtatgatacaactggtggaaagagaggtggctttactatctccactcatcttcagggtgacgatgttaaggattggcgtgagttcgttacttacttttcgtacccaatcgaagatcgggactactcaagatggcctgaaaagccagagggatggaggtcaaccactgaggtttatagtgagaagttaatggtgctaggtgccaagttactggaagtgttgtcagaggccatggggcttgagaaagaggctcttacaaaggcttgtgtgaatatggaacagaaagtgttaatcaattactatcccacatgccccgaacccgacttgacacttggagtcagaaggcatacggatccaggtactattaccattctgcttcaggacatggttggtggattacaggctactagggatggcggcaaaacatggatcactgttcagcctgtggagggagcttttgtggtcaatttgggtgaccatggtcattatttgagcaatggaaggttcaagaatgctgaccaccaagcagtagtgaattcaacttctagcagattgtctattgcaactttccagaacccggcccagaatgcgatagtgtatcccttaaaaatcagggagggagaaaaggcaattcttgatgaggccatcacctacgctgaaatgtataagaaaaacatgactaaacatattgaggtggctgccctgaagaaattggccaaggagaaaaggctgcaagatgagaaggccaagctggagatgtaa

SEQ ID NO: 158 - protein, 355 aa, Aethusa cynapium
MAPTTITALSQEKSLNLDFVRDEDERPKVAYNQFSNEIPIISLAGMDDDSNGRRPEICRKIVEAFEDWGIFQVVDHGIDKGLISQMSRLSREFFALPAEEKLRYDTTGGKRGGFTISTHLQGDDVKDWREFVTYFSYPIEDRDYSRWPEKPEGWRSTTEVYSEKLMVLGAKLLEVLSEAMGLEKEALTKACVNMEQKVLINYYPTCPEPDLTLGVRRHTDPGTITILLQDMVGGLQATRDGGKTWITVQPVEGAFVVNLGDHGHYLSNGRFKNADHQAVVNSTSSRLSIATFQNPAQNAIVYPLKIREGEKAILDEAITYAEMYKKNMTKHIEVAALKKLAKEKRLQDEKAKLEM

SEQ ID NO: 159 - DNA, 1068 bp, Apium graveolens
atggctccatcaactataactgcactgtctcaagagaagacactgaacttagactttgtgagggatgaagatgagcgtcccaaagttgcttacaatcaattcagcaatgaagttcccatcatttctttagctggtttggatgacgattctaatggcaggagagctgagatatgtcgtaaaatagttgaggctttcgaagaatggggaattttccaagttgttgatcacggtattgatagcggtttgatttctgagatgagtcgtctttctcgtgaattcttcgctttgcctgctgaggaaaaacttgtgtatgataccactggtgaaaagaaaggcggctttactatctccactcatcttcagggagatgatgttcgggattggcgtgagtttgttacttacttttcgtatccaatcagtgctcgggactactcaagatggcctaaaaagcccgaggggtggagatcaaccacggaggtttatagtgagaagttaatggtgctaggtgccaagttactggaggtgttatccgaggcaatggggcttgagaaagaggctcttacaaaggcttgtgtggaaatggaacagaaagtgttaattaattactatcccacatgccccgaacccgacttgacgctaggtgtcagaaggcatacggatccaggtactattaccattctgcttcaggacatggttggtggtttacaggctactagggatggcggcaaaacttggattactgttcagcctgtggagggagcttttgttgtcaatttgggtgatcatggtcattatttgagcaatggaaggttcaggaatgctgaccatcaagcagtagtgaattcaacttccaccagattgtcaattgcaactttccagaacccggctcagaatgcgatagtatatccgttaaagatcagggagggagagaaggcaattctggatgaggccatcacctacgctgaaatgtataagaaaaacatgactaaacatattgcggtggctacccagaagaaattggccaaggagaaaaggttgcaagatgagaaggccaagatgaagatatga

SEQ ID NO: 160 - protein, 355 aa, Apium graveolens
MAPSTITALSQEKTLNLDFVRDEDERPKVAYNQFSNEVPIISLAGLDDDSNGRRAEICRKIVEAFEEWGIFQVVDHGIDSGLISEMSRLSREFFALPAEEKLVYDTTGEKKGGFTISTHLQGDDVRDWREFVTYFSYPISARDYSRWPKKPEGWRSTTEVYSEKLMVLGAKLLEVLSEAMGLEKEALTKACVEMEQKVLINYYPTCPEPDLTLGVRRHTDPGTITILLQDMVGGLQATRDGGKTWITVQPVEGAFVVNLGDHGHYLSNGRFRNADHQAVVNSTSTRLSIATFQNPAQNAIVYPLKIREGEKAILDEAITYAEMYKKNMTKHIAVATQKKLAKEKRLQDEKAKMKI

SEQ ID NO: 161 - DNA, 1104 bp, Allium cepa
atggcaccggcacaaactccatttctacccacaatctcagatgaaaaaactctacgttccagcttcgtgggggacgaagacgagcgtcccaagattgcatacaacgtgtttagcgatgaaattccaataatatcccaggatggcatcgacgatgcaaatggaaagagaggggaaatatgtaggaagatagtagaagcacgcgaggactggggggtgtttcaggtaattgaccatggcgttgagcaggaggtgattaaggacatgacaaaaatggctagagagttcttcgcattgccgcctgaagagaagttgaggttcgatatgtcaggtggaaagaagggcggtttcattgtttccagtcatcttcagggagaagcggttcaagactggagagagatagtaacatacttctcatacccgatcagagccagagactactcccgctggcccgataagcccgaaggttggatttccgttgctgaaaaatacagcgaaaaactcatggacttggcctgtaaattactgggcatcccttcagaagccatgggcttggacacagaggccttaactaaggcctgcatcgatatggaccagaagatggtggtgaacttctacccaaaatgccctcaacctgatctcactctaggcttgaagcgtcataccgatcctggtaccatcactctgctgcttcaggaccaggtcggcggtctgcaagcgactaaagatggtggaaagacttggatcactgttcaacccgttgaaggcgcatttgtagttaaccttggtgaccatggccattatttgagcaatggtaggttcaagaatgcagaccaccaggcagtggtgaattcaaactacagcaggctgtcgattgccacgtttcagaatccggcaccggaggtaattgtatatcctctggcaatcagggaaggagaaaaaccgatattagaggagccgattacttttgcagagatgtatagaaggaagatgagcaaagacattgagcttgcaaagctcaagaaactggcaaagaaaaacaaggaaatttcggagaagacacaaattgcagctctgcccaaggccattgatgagatactagcctag

SEQ ID NO: 162 - protein, 367 aa, Allium cepa
MAPAQTPFLPTISDEKTLRSSFVGDEDERPKIAYNVFSDEIPIISQDGIDDANGKRGEICRKIVEAREDWGVFQVIDHGVEQEVIKDMTKMAREFFALPPEEKLRFDMSGGKKGGFIVSSHLQGEAVQDWREIVTYFSYPIRARDYSRWPDKPEGWISVAEKYSEKLMDLACKLLGIPSEAMGLDTEALTKACIDMDQKMVVNFYPKCPQPDLTLGLKRHTDPGTITLLLQDQVGGLQATKDGGKTWITVQPVEGAFVVNLGDHGHYLSNGRFKNADHQAVVNSNYSRLSIATFQNPAPEVIVYPLAIREGEKPILEEPITFAEMYRRKMSKDIELAKLKKLAKKNKEISEKTQIAALPKAIDEILA

SEQ ID NO: 163 - DNA, 1113 bp, Anthurium andraeanum
atggttcccgcggcaacacccttcctgccgacgaccgcggaggaggcgacgctgcgccccagcttcatccgcgacgaggacgagcgccccaaggtgccccacaaccagttcagcgacgccatccccgtcctctccctcgccggcatcgacgactccgacgggtcgccccgcagggcggagctgtgccgcgagatcgtggaggcctgcgaagggtggggcatcttccaggtggtggaccacggcgtcgacccaggcctggtcgccgacatgacgcgcctcgccacggagttcttcgccctcccgcccgaggacaagctccgctacgacatgtccgggggcaagaagggcggcttcatcgtctccagccacctccagggggaggccgtgcaggactggagggagatcgtgacctacttctcgtacccagtacgggcgcgggactacacgaggtggcccgacaagccggaggggtggcgggcggtggtggaggcgtacagcgaggggttgatggggctcgcctgcaagctgctgggggtgctgtccgaggccatggggctggacaaggaggcgctcgccaaggcctgcgtcgacatggaccagaaggtggtggtgaacttctaccccaggtgcccccagcccgacctcaccctcggggtcaagcgccacaccgaccccggcaccatcaccctcctcctccaggaccaggtcggcggcctccaggccaccagagacggcggcaagacctggatcaccgtccagcccgtcgagggcgccttcgtcgtcaacctcggcgaccacggtcacctcctgagcaacgggcggttcaagaacgcggaccaccaggcggtggtgaactcggagcgcagccggctgtcgatcgcgacgttccagaacccggcgccggagggggtcgtgtacccgctggccgtccgggagggggagaagccggtgctcgacgagcccatctccttctccgagatgtaccggaggaagatgagccgagacctggagctcgccaggctcaagaaacaggccaagctgcagcagcaggacgtgctggccaaggccgaggatgccaacaaacacaaagccctcgatgagattctggcctga

SEQ ID NO: 164 - protein, 370 aa, Anthurium andraeanum
MVPAATPFLPTTAEEATLRPSFIRDEDERPKVPHNQFSDAIPVLSLAGIDDSDGSPRRAELCREIVEACEGWGIFQVVDHGVDPGLVADMTRLATEFFALPPEDKLRYDMSGGKKGGFIVSSHLQGEAVQDWREIVTYFSYPVRARDYTRWPDKPEGWRAVVEAYSEGLMGLACKLLGVLSEAMGLDKEALAKACVDMDQKVVVNFYPRCPQPDLTLGVKRHTDPGTITLLLQDQVGGLQATRDGGKTWITVQPVEGAFVVNLGDHGHLLSNGRFKNADHQAVVNSERSRLSIATFQNPAPEGVVYPLAVREGEKPVLDEPISFSEMYRRKMSRDLELARLKKQAKLQQQDVLAKAEDANKHKALDEILA

SEQ ID NO: 165 - DNA, 1092 bp, Hieracium pilosella
atggcaccggcgtcaatgaaatgggacgaaaactcattacttgaaaaagggttcctccgtgacgaagatgaacggccgaaggtgccttacaaccagtttagcaacgagattccggtgatctcactggaaggtatcgacgatgtggaagggagcggtggtggtagatcacgtagggcggagatttgtgagaagatcgtgaaagcctttgaggattgggggatttttcaggtggtggatcatggcgtcgatgcaaaactgttgtcggagatgaaaaggctagcgagagagttcttccttatgccggaggaggagaagctcaagtttgatatggccggcgggaagaaaggcggtttccttgtttctagccatcttaagggagaaacggtgcaaaattggagggagtttgtgacatacttctcgtacccaataaaagcaagagactactcaaggtggcccaataagcccaatgaatggaggtcagttactgaggaatacagtgagaagtcaatgggcctagcctgcaaacttttagaagtgttgtctgaagcaatgggccttgagaaagaggccctaacaaaagcctgtgttgatatggaccaaaaagtggtagtaaattactatccaaaatgtcctcagcctgacctcaccttgggccttaagcgccatactgatccaggaacgatcacattggtgcttcaagatctagttggtgggcttcaagcaacgcgcgatggtggcaagagttggatcacagttgagccgattgaaggtgctttcgtggttaatcttggtgatcatggtcattatttgagcaacgggaggttcaagaacgcagaccaccaggccgtggtgaactcatcaactagtcgactatcgatagcgacatttcaaaaccctgcaccagaggcgattgtctacccgttgaagatcaatgaaggagagaaatccataatggaagaagctatgactttcatggacatgtacaagaagaagatgagtggagacctcgagttagctcggctcaagaaactagctaaggacaagaaggataacttggaaaaagtcaagccgaccaaaaatatatttgtttaa

SEQ ID NO: 166 - protein, 363 aa, Hieracium pilosella
MAPASMKWDENSLLEKGFLRDEDERPKVPYNQFSNEIPVISLEGIDDVEGSGGGRSRRAEICEKIVKAFEDWGIFQVVDHGVDAKLLSEMKRLAREFFLMPEEEKLKFDMAGGKKGGFLVSSHLKGETVQNWREFVTYFSYPIKARDYSRWPNKPNEWRSVTEEYSEKSMGLACKLLEVLSEAMGLEKEALTKACVDMDQKVVVNYYPKCPQPDLTLGLKRHTDPGTITLVLQDLVGGLQATRDGGKSWITVEPIEGAFVVNLGDHGHYLSNGRFKNADHQAVVNSSTSRLSIATFQNPAPEAIVYPLKINEGEKSIMEEAMTFMDMYKKKMSGDLELARLKKLAKDKKDNLEKVKPTKNIFV

SEQ ID NO: 167 - DNA, 1086 bp, Populus trichocarpa
atggaaagctccgaaacgcaattagatttggtgcaaaacggatcaggctatgacatagaaaaagaaatcaaggcctttgatgaatcaaaggctggtgttaagggtcttgtagattctgggatagtaaaaataccacccttctttgttgttccagaaaaagtagtctcttctcaaccgactcctgcccatcttcagattcctgtcatagacctcgaagacatccgtgatgatcctgttcgacacgaaaaggtcatcaaggaaatacgaagtgctttagagatatggggtttcttccaggttgtgaaccatggtgtatcaaaggatattacggagggaatgattgaaggagtgaagggatttcatgaggaaaagaatgaagtcaaaagggaatattatacgagggatgtgaagaagaaggtgacttacactagcaacactcttattcataagacaaaagcagcggattggaaggataccttgtattttcgaatggctcctgattctccacgtcctgaagaacttccagttgtctgcagggagacaacaatcaagtattcggcatatataaggggtttaggggatacccttcttaaattagtatcggaggctcttggactcaatcctaattatctgattgaatttgggtgcgctaaagggctcaagattatgtgccattactatccaccgtgccctgagcccaaccgaactctgggaagcaaaccgcatactgatcctgacttcctgactatccttatgcaagaccatattggtggtctccaagtttttcatcagaatcaatggattaatgtccctccaattccaggagcttttgtaattaacgctggtgaccttctacagcttatatcaaatggaaagttcaagagcgttgagcacagggtgctggctaatcacaatggcccaagaatatcagtggccagcttctttgttatttatgacaggatttgtggtccaataaaagagttgctatcggatgaaaatcctccgttgtacaaggaagtccctctcatggaatacattactcaatacattcagacttggttcaaaatggatctgtctatgatatag

SEQ ID NO: 168 - protein, 361 aa, Populus trichocarpa
MESSETQLDLVQNGSGYDIEKEIKAFDESKAGVKGLVDSGIVKIPPFFVVPEKVVSSQPTPAHLQIPVIDLEDIRDDPVRHEKVIKEIRSALEIWGFFQVVNHGVSKDITEGMIEGVKGFHEEKNEVKREYYTRDVKKKVTYTSNTLIHKTKAADWKDTLYFRMAPDSPRPEELPVVCRETTIKYSAYIRGLGDTLLKLVSEALGLNPNYLIEFGCAKGLKIMCHYYPPCPEPNRTLGSKPHTDPDFLTILMQDHIGGLQVFHQNQWINVPPIPGAFVINAGDLLQLISNGKFKSVEHRVLANHNGPRISVASFFVIYDRICGPIKELLSDENPPLYKEVPLMEYITQYIQTWFKMDLSMI

SEQ ID NO: 169 - DNA, 1101 bp, Solanum lycorpersicum
atggcgaattccggtcctctgaacccaaacccggttccgaactccgatcgtctcgaacaactgaaacaattcgatgagtcgaaaattggagttaaagggcttgttgataagggccttactactatacccagtttcttcatccactcagaagaatcaaacccggaacccaaaacccgatcaagtaacaatcactgcatacccgtcgtcgacttttctgcttctcgggaaacagtcgttgaacaagttcatcgtgcttcaacgagcttagggttcttccagattatcaaccattctgttccggtcagtgctataaatagaattgtaggttcgattaaatcgtttaacgaacagaataatgaattgaagatgaagtattatagtagggatattactcatggagcagcgtattctacgaattttgatttgtataactcgaaagctgcaagctggagggatacgttgcaggtgagattgtcgcctactccaccggattgggagtatgtgccggaggtgtgtagggaggcggtgatggagtgggataaggaagtggtgaaaattggggaagaattgatgggtttgttgtgtgaagggttaggagtggaaaaagatagattgaaggaattgtcttgtttggatggaagagttatggctgcacattactatccttattgtcctcagccggagttgacgaaagggttgacgcctcatacggatcccggtgtgttgacggtgttggtgcagaatgaaatgagtggattgcaagtgaaatttggggaagattgggtggatttgaagccgattccgggggctattgtgattaatattggtgatattcttcagataatatcgaatgatgaatacaagagcgtggtgcaccgagttctagccaaccctttccaagaaccccgcgtatcagttgccatcttctttaatccaggacaaagagagaactcatttggacctctgcctgaactgatatcagatgaaaagccagcagtttaccgcgaattcatgtacacggattacatggggaggttcttttcaaaggagttggatgggaagactttgacaaattactacagggtttcaaatcaaatataa

SEQ ID NO: 170 - protein, 366 aa, Solanum lycorpersicum
MANSGPLNPNPVPNSDRLEQLKQFDESKIGVKGLVDKGLTTIPSFFIHSEESNPEPKTRSSNNHCIPVVDFSASRETVVEQVHRASTSLGFFQIINHSVPVSAINRIVGSIKSFNEQNNELKMKYYSRDITHGAAYSTNFDLYNSKAASWRDTLQVRLSPTPPDWEYVPEVCREAVMEWDKEVVKIGEELMGLLCEGLGVEKDRLKELSCLDGRVMAAHYYPYCPQPELTKGLTPHTDPGVLTVLVQNEMSGLQVKFGEDWVDLKPIPGAIVINIGDILQIISNDEYKSVVHRVLANPFQEPRVSVAIFFNPGQRENSFGPLPELISDEKPAVYREFMYTDYMGRFFSKELDGKTLTNYYRVSNQI

SEQ ID NO: 171 - DNA, 1041 bp, Physcomitrella patens
atggtgcagtacatggtcgaggaaggtatagcggaggtgccaaaacggttcgttcaaccacctcacatgcgtccagctgtaggacggagaagctctagcgatgacgaagtgcccatcattgacatggcactggggaaagacgaagaaggaaggaagcaactccatgcagatattgctcgcgcttgtgaagagtgggggtttttccaggcaataaatcatggcgttcctgacactctcatggatgctatgatggacatggagaagaagttctattctctgacttcagaggaaaaagaagtgtataaaaagcgtaagacgaccatgtctgtgggttatggtggtgtgtatgataagcacaaggaccaagccttggtgtggatggatcgtttaacagtagacttgccttcagccagagacctaactgaaacttacaatcttgtcattgataacccccctgggttccaggaggtgtacgttgagtatgggaaggcaatctacgagtttgccaaggagatcatggctatcatttccgaagtgctgggtcaacctaaagactttttattcaaaaaaattggggacgatcgggcagctatgaaaacagctttcaactactatcctcaatgccctcagccggagtttgtgctgggactccctccacatgccgatgcaagcgctctggcgatcctacaacaaggttcaccaggactggaagtgttgaaaaatggattctggattcctgttccgccgtgttcgaaacgttcattggttgtcaatgtcggcgatgtgatacagatgataagcaacgcgagatttaagagctcgcttcatcgagcagttgtgacggaaataagccgctacagcataggcagctttataatgcctcaccgagaaatatatttggcaccagctgctgagctctgcgacgaaatgaacccgccaatatatagaagtgtaaagtacgcggagtacattcttgagtacctaagtcgggggatcaaggacgatttacgggtcgtggacctatttagactgtgtacataa

SEQ ID NO: 172 - protein, 346 aa, Physcomitrella patens
MVQYMVEEGIAEVPKRFVQPPHMRPAVGRRSSSDDEVPIIDMALGKDEEGRKQLHADIARACEEWGFFQAINHGVPDTLMDAMMDMEKKFYSLTSEEKEVYKKRKTTMSVGYGGVYDKHKDQALVWMDRLTVDLPSARDLTETYNLVIDNPPGFQEVYVEYGKAIYEFAKEIMAIISEVLGQPKDFLFKKIGDDRAAMKTAFNYYPQCPQPEFVLGLPPHADASALAILQQGSPGLEVLKNGFWIPVPPCSKRSLVVNVGDVIQMISNARFKSSLHRAVVTEISRYSIGSFIMPHREIYLAPAAELCDEMNPPIYRSVKYAEYILEYLSRGIKDDLRVVDLFRLCT

SEQ ID NO: 173 - protein, 50 aa, Artificial sequence
  motif 1
  VARIANT (2)..(2): / replace = "Ile" / replace = "Tyr"
  VARIANT (4)..(4): / replace = "Ala"
  VARIANT (6)..(6): / replace = "Pro"
  VARIANT (7)..(7): / replace = "Val"
  VARIANT (9)..(9): / replace = "His" / replace = "Asn"
  VARIANT (10)..(10): / replace = "Ser"
  VARIANT (11)..(11): / replace = "Phe" / replace = "Leu"
  VARIANT (13)..(13): / replace = "Met"
  VARIANT (14)..(14): / replace = "Asn"
  VARIANT (15)..(15): / replace = "Val"
  VARIANT (18)..(18): / replace = "Thr"
  VARIANT (20)..(20): / replace = "Gln"
  VARIANT (25)..(25): / replace = "Ser"
  VARIANT (26)..(26): / replace = "Thr"
  VARIANT (30)..(30): / replace = "Ile"
  VARIANT (31)..(31): / replace = "Leu"
  VARIANT (34)..(34): / replace = "Val"
  VARIANT (35)..(35): / replace = "Ile"
  VARIANT (38)..(38): / replace = "Ser"
  VARIANT (39)..(39): / replace = "Asp"
  VARIANT (41)..(41): / replace = "Glu"
  VARIANT (43)..(43): / replace = "Ile"
  VARIANT (45)..(45): / replace = "Leu"
  VARIANT (47)..(47): / replace = "Phe"
  VARIANT (49)..(49): / replace = "Tyr"
  VARIANT (50)..(50): / replace = "Asn"
WVTVKCHPDAIIVHIGDQIEILSNGKYKSVEHRGLVNKEKVRVSWAVFCE

SEQ ID NO: 174 - protein, 40 aa, Artificial sequence
  motif 2
  VARIANT (1)..(1): / replace = "Asp"
  VARIANT (2)..(2): / replace = "Asn" / replace = "Glu"
  VARIANT (3)..(3): / replace = "Ile"
  VARIANT (4)..(4): / replace = "Gly"
  VARIANT (5)..(5): / replace = "Leu"
  VARIANT (6)..(6): / replace = "Cys"
  VARIANT (7)..(7): / replace = "Met"
  VARIANT (8)..(8): / replace = "Arg"
  VARIANT (9)..(9): / replace = "Val"
  VARIANT (14)..(14): / replace = "Pro"
  VARIANT (17)..(17): / replace = "Gln"
  VARIANT (19)..(19): / replace = "Asp"
  VARIANT (21)..(21): / replace = "Thr"
  VARIANT (24)..(24): / replace = "Leu"
  VARIANT (25)..(25): / replace = "Ser"
  VARIANT (26)..(26): / replace = "Pro"
  VARIANT (28)..(28): / replace = "Thr"
  VARIANT (30)..(30): / replace = "Met" / replace = "Val"
  VARIANT (31)..(31): / replace = "Gly"
  VARIANT (32)..(32): / replace = "Gly"
  VARIANT (33)..(33): / replace = "Met"
  VARIANT (35)..(35): / replace = "Ile"
  VARIANT (36)..(36): / replace = "Ile"
  VARIANT (38)..(38): / replace = "His"
  VARIANT (39)..(39): / replace = "Asp"
  VARIANT (40)..(40): / replace = "Glu" / replace = "Met"
EDLLAQLKINYYPKCPRPELALGVEAHSDPSALTFLLPND

SEQ ID NO: 175 - protein, 41 aa, Artificial sequence
  motif 3
  VARIANT (3)..(3): / replace = "Val"
  VARIANT (4)..(4): / replace = "Met"
  VARIANT (5)..(5): / replace = "His"
  VARIANT (6)..(6): / replace = "Leu"
  VARIANT (11)..(11): / replace = "Val"
  VARIANT (12)..(12): / replace = "Ser" / replace = "Lys"
  VARIANT (14)..(14): / replace = "Asp"
  VARIANT (16)..(16): / replace = "Ile"
  VARIANT (17)..(17): / replace = "Glu"
  VARIANT (18)..(18): / replace = "Ala"
  VARIANT (19)..(19): / replace = "Val"
  VARIANT (20)..(20): / replace = "Gln"
  VARIANT (21)..(21): / replace = "Lys"
  VARIANT (22)..(22): / replace = "Val" / replace = "Gln"
  VARIANT (23)..(23): / replace = "Trp"
  VARIANT (24)..(24): / replace = "Lys"
  VARIANT (25)..(25): / replace = "Ala"
  VARIANT (28)..(28): / replace = "Glu"
  VARIANT (29)..(29): / replace = "Met"
  VARIANT (32)..(32): / replace = "Glu"
  VARIANT (33)..(33): / replace = "Glu"
  VARIANT (36)..(36): / replace = "Thr"
  VARIANT (38)..(38): / replace = "Ser"
  VARIANT (40)..(40): / replace = "Ser"
  VARIANT (41)..(41): / replace = "Gln"
WGFFQVVNHGIPPELMDRAREAGREFFHLPVNAKEKYANDP

SEQ ID NO: 176 - protein, 29 aa, Artificial sequence
  motif 4
  VARIANT (1)..(1): / replace = "His" / replace = "Gly"
  VARIANT (2)..(2): / replace = "Ser"
  VARIANT (3)..(3): / replace = "Leu"
  VARIANT (4)..(4): / replace = "Ile"
  VARIANT (7)..(7): / replace = "Val"
  VARIANT (10)..(10): / replace = "Thr"
  VARIANT (11)..(11): / replace = "Leu"
  VARIANT (12)..(12): / replace = "Gln"
  VARIANT (15)..(15): / replace = "Thr"
  VARIANT (17)..(17): / replace = "Ser"
  VARIANT (18)..(18): / replace = "Thr"
  VARIANT (19)..(19): / replace = "Phe"
  VARIANT (20)..(20): / replace = "Arg"
  VARIANT (23)..(23): / replace = "Glu"
  VARIANT (26)..(26): / replace = "Ala"
  VARIANT (27)..(27): / replace = "Ile" / replace = "Leu"
DAFVVNIGDQIEILSNGRYKSVLHRVVVN

SEQ ID NO: 177 - protein, 18 aa, Artificial sequence
  motif 5
  VARIANT (6)..(6): / replace = "Leu"
  VARIANT (11)..(11): / replace = "Ile"
  VARIANT (12)..(12): / replace = "Lys" / replace = "Ser"
  UNSURE (13)..(13): Xaa is an unknown amino acid
  VARIANT (16)..(16): / replace = "Leu" / replace = "Met"
  VARIANT (17)..(17): / replace = "Glu"
  VARIANT (18)..(18): / replace = "Ala"
WGFFQVVNHGVPXELIDR

SEQ ID NO: 178 - protein, 15 aa, Artificial sequence
  motif 6
  VARIANT (3)..(3): / replace = "Val"
  VARIANT (4)..(4): / replace = "Ser"
  VARIANT (5)..(5): / replace = "Ala"
  VARIANT (7)..(7): / replace = "Ser"
  VARIANT (10)..(10): / replace = "Ser"
  UNSURE (11)..(11): Xaa is an unknown amino acid
  VARIANT (12)..(12): / replace = "Met" / replace = "Ile"
  VARIANT (14)..(14): / replace = "Leu"
LGLGPHTDPGXLTIL

SEQ ID NO: 179 - protein, 6 aa, Artificial sequence
  motif 7
  VARIANT (2)..(3): Xaa is an unknown amino acid
  VARIANT (4)..(4): / replace = "Phe"
  VARIANT (5)..(5): / replace = "Val"
  VARIANT (6)..(6): / replace = "Gln" / replace = "Arg"
PXXYIK

SEQ ID NO: 180 - protein, 4 aa, Artificial sequence
  motif 8
  VARIANT (2)..(2): / replace = "Glu"
  VARIANT (3)..(3): / replace = "Ala" / replace = "Thr"
  VARIANT (4)..(4): / replace = "Ile" / replace = "Val"
VQSL

SEQ ID NO: 181 - protein, 5 aa, Artificial sequence
  motif 9
  VARIANT (1)..(1): / replace = "Gln"
  VARIANT (5)..(5): / replace = "Thr"
EGYGS

SEQ ID NO: 182 - DNA, 55 bp, Artificial sequence
  primer: prm04344
ggggacaagtttgtacaaaaaagcaggcttcacaatgaacaagaacaagattgat

SEQ ID NO: 183 - DNA, 50 bp, Artificial sequence
  primer: prm04345
ggggaccactttgtacaagaaagctgggtctttaagggaagaaataaaag

SEQ ID NO: 184 - DNA, 2194 bp, Oryza sativa
aatccgaaaagtttctgcaccgttttcaccccctaactaacaatatagggaacgtgtgctaaatataaaatgagaccttatatatgtagcgctgataactagaactatgcaagaaaaactcatccacctactttagtggcaatcgggctaaataaaaaagagtcgctacactagtttcgttttccttagtaattaagtgggaaaatgaaatcattattgcttagaatatacgttcacatctctgtcatgaagttaaattattcgaggtagccataattgtcatcaaactcttcttgaataaaaaaatctttctagctgaactcaatgggtaaagagagagattttttttaaaaaaatagaatgaagatattctgaacgtattggcaaagatttaaacatataattatataattttatagtttgtgcattcgtcatatcgcacatcattaaggacatgtcttactccatcccaatttttatttagtaattaaagacaattgacttatttttattatttatcttttttcgattagatgcaaggtacttacgcacacactttgtgctcatgtgcatgtgtgagtgcacctcctcaatacacgttcaactagcaacacatctctaatatcactcgcctatttaatacatttaggtagcaatatctgaattcaagcactccaccatcaccagaccacttttaataatatctaaaatacaaaaaataattttacagaatagcatgaaaagtatgaaacgaactatttaggtttttcacatacaaaaaaaaaaagaattttgctcgtgcgcgagcgccaatctcccatattgggcacacaggcaacaacagagtggctgcccacagaacaacccacaaaaaacgatgatctaacggaggacagcaagtccgcaacaaccttttaacagcaggctttgcggccaggagagaggaggagaggcaaagaaaaccaagcatcctccttctcccatctataaattcctccccccttttcccctctctatataggaggcatccaagccaagaagagggagagcaccaaggacacgcgactagcagaagccgagcgaccgccttctcgatccatatcttccggtcgagttcttggtcgatctcttccctcctccacctcctcctcacagggtatgtgcctcccttcggttgttcttggatttattgttctaggttgtgtagtacgggcgttgatgttaggaaaggggatctgtatctgtgatgattcctgttcttggatttgggatagaggggttcttgatgttgcatgttatcggttcggtttgattagtagtatggttttcaatcgtctggagagctctatggaaatgaaatggtttagggatcggaatcttgcgattttgtgagtaccttttgtttgaggtaaaatcagagcaccggtgattttgcttggtgtaataaagtacggttgtttggtcctcgattctggtagtgatgcttctcgatttgacgaagctatcctttgtttattccctattgaacaaaaataatccaactttgaagacggtcccgttgatgagattgaatgattgattcttaagcctgtccaaaatttcgcagctggcttgtttagatacagtagtccccatcacgaaattcatggaaacagttataatcctcaggaacaggggattccctgttcttccgatttgctttagtcccagaattttttttcccaaatatcttaaaaagtcactttctggttcagttcaatgaattgattgctacaaataatgcttttatagcgttatcctagctgtagttcagttaataggtaatacccctatagtttagtcaggagaagaacttatccgatttctgatctccatttttaattatatgaaatgaactgtagcataagcagtattcatttggattattttttttattagctctcaccccttcattattctgagctgaaagtctggcatgaactgtcctcaattttgttttcaaattcacatcgattatctatgcattatcctcttgtatctacctgtagaagtttctttttggttattccttgactgcttgattacagaaagaaatttatgaagctgtaatcgggatagttatactgcttgttcttatgattcatttcctttgtgcagttcttggtgtagcttgccactttcaccagcaaagttc

SEQ ID NO: 185 - DNA, 2870 bp, Populus trichocarpa
agagtttttttgattgtgattcttgataagatgttaccctcggggccgcctactccaattggtggtgcccagtctgtctctccttcacttttgagatcgaattcggggatgctgggagctcaaggtggccctttgggttctcaaacagccttcccgtctctagtgtccccccgtactcagtttaataacatgagcatgcttggaaatgtgcccaacatgtcctccctgctgaaccagtcttttggtaatggaggtccaaatcctggacttcctggccctgggagcagtcagcgcggaaatattgatactggggcagagtccgatccactttcaaatggtggtaatggaatgggtttcaatgctccttcatcgtcatttgtaccatcaaatatggttaaccctggtccttcttgtcaagttcagggacatcagttttcaaacccttctggcaaccagttgttgccagatcaacagcagtcccaacaacttgaagcacaaaatttccagcatggtcagcaatcaatgcaacagttctctggcgctcataacactcagcaggtgcagcagcagcaccagtttcaatcaatacgaggagggttggctggtgttggacctgttaagttggagccacatgtgactaatgatcaacatggagcacggcaactgcaacaacctcagccactgagaaatatgggtccagttaagttggagcaccagcaaattcagacgatgcgaagtttgccaactgtgaagttggaacctcaacattcagatcaatctttgtttttacatcaacagcaacaacatcagcagcaacagcagcagcatcatcatcatcatcagcagcagcagcagcagcagcagcagcaacagcagcagcagttccttcacatgtcaaggcagtcttctcagcaggctgttgcacaactaaatcttttgcatcagcaaaggctgctgcagcaacagcaacttttgaaggcaatgccacagcaacggcctcaattaccacaacaatttcaacaacagaatatacctttgaggtctcctgtaaaaccagtgtatgaacctgggatgtgtgcccgtcgtctcacaaattacatgcatcaacagcagcgcagacctgaagacaataacatagaattctggaggaaatttgttgctgagttctttgctccccatgcaaaaaagaagtggtgtgtttctatgtacggaagtggccggcaaacaactggtgttttccctcaggacgtatggcattgtgagatttgcaatcgcaagccaggccgtggttttgaggcaactgttgaggttcttcctaggcttttcaaaatcaaatatgaaagtggcactttggaagaacttctttatgttgatatgccacgtgaatatcaaaactcatctggtcaaattgtcctggattatgcaaaagcaatacaagagagtgtttttgagcaacttcgcgttgttcgtgatggtcagctgcggatagtcttctccccagacttgaagatatgctcttgggagttttgtgctcggcgccatgaagagctaatacctcgaagattgttgataccacaggtaagtcagcttggtgctgcagctcaaaagtaccaggctgctactcaaaatgcatcatccaatttatctgtcccggagttgcaaaataattgtaacttgtttgttgcatcagctcggcaactggcaaaagccttggaagtgccattagtaaatgatctgggatatacaaagagatatgtgcggtgccttcagatatcagaagtggtaaatagtatgaaagacttgattgattatagtcgagaaacaggaactggaccaatggagagtttgtccaagttccctaggaggacaggtgcttcaattgggttccatagtcaagcacaacagcctgaggaacagcaacaacaacagcaaacaataactgcgaactcaaatagtgatcaaagttctgcccaagccacaatgcaaattgctgctagcaatggtatggctagtgtaaataactcactcaacacagcatctacaactacctatgccagcgctattgttgggcttgtccaccaaaattctatgaattcaagacaacaaaattctatcaataatgcaagcagtccctatggaggaaactctgttcagattccatctcctggttcctccagtacgattccacaagcacaacctaacccttctcctttccagtcgccaacaccgtcctcgtctaataatcctccacaagcatctcatagtgccttgacagctgtgaatcacattagttccacaaattcaccagcaaatattccgttgcaacagccaactctttctggcgaggctgaccatggtgattctcaaagctctgtccagaaatttttacatgaaatgatgttaaccagtcaacttaatggaactggtggcatggttggggttggttcgttggggaatgaagtgaaaaatgtcaatggaattttgccaacaggtaataatacggttcttaatggtggaaatggcctggtgggaaatggggcagtcaatagttctggaatagggggtgctggatatgggactatgggtggacttgcgcagtctgtaatggtcaatgggatcagagctgcaatgggtaataactcaatgatgaatggtcggatgggcatgccatcgatggtacgagaccagagcatgaatcatcaacaggatttggggaaccaactgcttagtgggctaggagcagttaatgggtttagtaatctccagtttgattggaaaccatccccttgaaggttctgttaattatattgatgtctccgcagctgcttctgcggtacaagtgtgggcagaatttcataaaagccttgtga

SEQ ID NO: 186 - protein, 919 aa, Populus trichocarpa
MLPSGPPTPIGGAQSVSPSLLRSNSGMLGAQGGPLGSQTAFPSLVSPRTQFNNMSMLGNVPNMSSLLNQSFGNGGPNPGLPGPGSSQRGNIDTGAESDPLSNGGNGMGFNAPSSSFVPSNMVNPGPSCQVQGHQFSNPSGNQLLPDQQQSQQLEAQNFQHGQQSMQQFSGAHNTQQVQQQHQFQSIRGGLAGVGPVKLEPHVTNDQHGARQLQQPQPLRNMGPVKLEHQQIQTMRSLPTVKLEPQHSDQSLFLHQQQQHQQQQQQHHHHHQQQQQQQQQQQQQQFLHMSRQSSQQAVAQLNLLHQQRLLQQQQLLKAMPQQRPQLPQQFQQQNIPLRSPVKPVYEPGMCARRLTNYMHQQQRRPEDNNIEFWRKFVAEFFAPHAKKKWCVSMYGSGRQTTGVFPQDVWHCEICNRKPGRGFEATVEVLPRLFKIKYESGTLEELLYVDMPREYQNSSGQIVLDYAKAIQESVFEQLRVVRDGQLRIVFSPDLKICSWEFCARRHEELIPRRLLIPQVSQLGAAAQKYQAATQNASSNLSVPELQNNCNLFVASARQLAKALEVPLVNDLGYTKRYVRCLQISEVVNSMKDLIDYSRETGTGPMESLSKFPRRTGASIGFHSQAQQPEEQQQQQQTITANSNSDQSSAQATMQIAASNGMASVNNSLNTASTTTYASAIVGLVHQNSMNSRQQNSINNASSPYGGNSVQIPSPGSSSTIPQAQPNPSPFQSPTPSSSNNPPQASHSALTAVNHISSTNSPANIPLQQPTLSGEADHGDSQSSVQKFLHEMMLTSQLNGTGGMVGVGSLGNEVKNVNGILPTGNNTVLNGGNGLVGNGAVNSSGIGGAGYGTMGGLAQSVMVNGIRAAMGNNSMMNGRMGMPSMVRDQSMNHQQDLGNQLLSGLGAVNGFSNLQFDWKPSP

SEQ ID NO: 187 - DNA, 3688 bp, Arabidopsis thaliana
ctcatcttcttctttctctcttctctctctctctctacagcgaagaacaggacacaaattactctgtgaagcttaaaaaggtataatttttaataaaacccagaaactacaatttctaggcggcagagaaaatttgtttctacttctttttgtttctctttgtcttctcgtctctttatccccaaacccatcaataaaaaaccctaaaagacttcaaatttcttcaagattttgttcatcggaagttttcagatttttagttgtgtaaagtctcttcctttttgttcgattctctttgttttgagtcttatcagagacttattcttcaattccacctctgggtggtgagagttggaaatggagtagatttgcttaatttagatctgtaagtaatcaacagacagtgttgtttggttctagaatgttcgatacggaatctcatcactcagattcatctctttccgtggtgtttacgactctgaagcttatcattgctcagaaagaatacgtctttgctcctacacagagctgagttttataaagtcgtcagttttgtttcttgctttctttgttgattgtggagttgtgaattagtaagagtatggtaccatcagagccgcctaatcctgttgggggtggtgaaaatgttccgccttcgatattaggaggacaaggaggagctcctcttccttctcaaccagcatttccttcacttgtctctccgcgtactcagtttggtaacaatatgagtatgagtatgcttgggaatgctccaaatatatcttctcttctcaataatcagtcttttgtaaatggtatccctggttctatgatttctatggatacaagtggtgctgagtctgacccgatgtctaacgtcgggtttagtggtttgtcgtcttttaatgcgtcgagtatggtgtctccgcgctcatcaggtcaagttcagggtcagcagttttcgaatgtttcggctaaccagttgttggctgagcaacaacggaataagaaaatggagacgcagagttttcaacatggtcagcagcagtcaatgcagcagcagttttcgacagtgcgtggtggtggattagcaggtgtgggacctgttaagatggagcctggtcaggtttcgaatgatcagcagcatggtcaagtacaacagcagcaacagaaaatgttgagaaacctagggtcagttaagttggaaccgcagcaaattcaggccatgagaaatttggcccaagtgaaaatggaacctcaacattctgagcagtcattgtttctccaacaacagcagaggcaacaacagcaacaacaacaacaacaatttcttcaaatgccggggcaatctccgcaggctcaaatgaacatatttcagcagcagagacttatgcaacttcaacaacagcaactcttgaaatctatgcctcaacagcgtcctcaattaccacagcagttccaacagcagaatttacctctaaggccacctctgaaaccagtgtatgaacctggcatgggtgctcagcgtcttacacagtatatgtacagacaacaacataggcctgaagacaataatatcgagttctggagaaaatttgtagctgagtactttgctcctaatgccaaaaagagatggtgcgtctctatgtatggcagtggcaggcaaacaacaggcgttttccctcaggatgtgtggcactgtgagatatgtaaccgaaagcctggacgtggttttgaggcaaccgccgaagtccttccgcggctgtttaagattaagtatgagagtgggacgttagaagaactgttatatgtagatatgccaagggagtcccagaattcatctggccaaattgtcctggagtatgcaaaagcaacacaagagagtgtctttgagcatcttcgggttgttcgtgatggccaacttcgaatagtcttctcgccagatcttaagatattctcctgggaattttgtgctcggcggcatgaagagcttattccacgaagacttttgataccgcaggttagtcagcttggatcggcagctcagaaatatcaacaagctgctcaaaatgcaacaacagattctgctcttccggagctacaaaataattgcaatatgtttgttgcatctgctagacaattggcaaaggccctggaagtaccacttgtgaatgatttgggatacacaaagagatatgttcggtgtttgcagatctcagaggtggtaaatagtatgaaggacctgatagattatagcagagaaacacgaacaggaccaatcgagagtttagccaagtttcctcggagaacaggcccttcatctgcactgcctggtccttctcctcagcaagccagcgaccagcttaggcagcagcagcaacaacaacagcagcagcagcaacagcaacaacaacaacaacaacaacagcagcagcagcaaacagtttcccagaatacaaacagtgatcaaagtagtaggcaagttgcactaatgcagggtaatccaagcaatggtgtaaattatgcctttaatgcagcctctgcatccacttccaccagcagcatcgcagggctcatccaccagaattcaatgaagggaagacatcagaatgctgcttacaatcctccaaacagcccctatggaggaaactctgttcagatgcaatcacctagttcctcgggtaccatggtgccatcatcatcgcagcaacaacacaacctgccaacatttcagtctccaacatcctcatctaataacaataatccctctcaaaacgggataccatctgttaatcacatgggttccacaaactcaccagcaatgcaacaggcaggtgaggttgatggaaacgagtctagctcggtgcagaagatactgaatgaaatcctgatgaacaaccaagctcataataatagctcaggaggaagcatggttgggcatgggtctttcgggaatgatgggaagggtcaagctaatgtaaatagttctggtgttttactgatgaatggccaagtgaacaacaacaacaacacaaatattggaggtgctggtgggtttggtggtgggattggtcaatccatggcagcaaacggaatcaataatataaacggtaacaatagtctcatgaacggaagagttgggatgatggtgcgggatccaaacggtcaacaggatttaggaaaccaacttttaggagcagtgaatggtttcaacaattttgattggaacgcgtgaaatgaagaagaggaagaagagacactgaaagggtaatgttctgcttgcgcagcatcacacatcttcaaactcaggataaggataggccaataagccgtgatattgtgcttaagaaaggaagagtcaaatctttgtatcaataactggtttctaggtcacctccacaatcaccaataccatctcttgagttactgtttctttttttactttggggagtttttcttatgctttatagtttataatgtacatctttctatcggtgtgtgttccttagggcacatcatcagggaggcaatgaatcaagctctatccttcatttatctctctggtctcttccatgtgttaaccaaacttccctaaattctgaccacaacgttaaatatgtgcaatgctcttgaacgatgctgatcggtcatgattttttgttgttagtgcaatgaaataccacaagcc

SEQ ID NO: 188 - protein, 877 aa, Arabidopsis thaliana
MVPSEPPNPVGGGENVPPSILGGQGGAPLPSQPAFPSLVSPRTQFGNNMSMSMLGNAPNISSLLNNQSFVNGIPGSMISMDTSGAESDPMSNVGFSGLSSFNASSMVSPRSSGQVQGQQFSNVSANQLLAEQQRNKKMETQSFQHGQQQSMQQQFSTVRGGGLAGVGPVKMEPGQVSNDQQHGQVQQQQQKMLRNLGSVKLEPQQIQAMRNLAQVKMEPQHSEQSLFLQQQQRQQQQQQQQQFLQMPGQSPQAQMNIFQQQRLMQLQQQQLLKSMPQQRPQLPQQFQQQNLPLRPPLKPVYEPGMGAQRLTQYMYRQQHRPEDNNIEFWRKFVAEYFAPNAKKRWCVSMYGSGRQTTGVFPQDVWHCEICNRKPGRGFEATAEVLPRLFKIKYESGTLEELLYVDMPRESQNSSGQIVLEYAKATQESVFEHLRVVRDGQLRIVFSPDLKIFSWEFCARRHEELIPRRLLIPQVSQLGSAAQKYQQAAQNATTDSALPELQNNCNMFVASARQLAKALEVPLVNDLGYTKRYVRCLQISEVVNSMKDLIDYSRETRTGPIESLAKFPRRTGPSSALPGPSPQQASDQLRQQQQQQQQQQQQQQQQQQQQQQQQTVSQNTNSDQSSRQVALMQGNPSNGVNYAFNAASASTSTSSIAGLIHQNSMKGRHQNAAYNPPNSPYGGNSVQMQSPSSSGTMVPSSSQQQHNLPTFQSPTSSSNNNNPSQNGIPSVNHMGSTNSPAMQQAGEVDGNESSSVQKILNEILMNNQAHNNSSGGSMVGHGSFGNDGKGQANVNSSGVLLMNGQVNNNNNTNIGGAGGFGGGIGQSMAANGINNINGNNSLMNGRVGMMVRDPNGQQDLGNQLLGAVNGFNNFDWNA

SEQ ID NO: 189 - DNA, 2194 bp, Oryza sativa; identical to SEQ ID NO: 184

SEQ ID NO: 190 - DNA, 51 bp, Artificial sequence
  primer: prm18918
ggggacaagtttgtacaaaaaagcaggcttaaacaatgttaccctcggggc

SEQ ID NO: 191 - DNA, 48 bp, Artificial sequence
  primer: prm18919
ggggaccactttgtacaagaaagctgggtacagaaccttcaaggggat

SEQ ID NO: 192 - DNA, 53 bp, Artificial sequence
  primer: prm18920
ggggacaagtttgtacaaaaaagcaggcttaaacaatggtaccatcagagccg

SEQ ID NO: 193 - DNA, 50 bp, Artificial sequence
  primer: prm18921
ggggaccactttgtacaagaaagctgggtccctttcagtgtctcttcttc

SEQ ID NO: 194 - DNA, 1443 bp, Arabidopsis thaliana
atggatcgtgtggttggtggtaagtataagcttggacgtaaacttggaagtggatcatttggtgaactttttctaggggttaatgtacaaactggagaagaagttgctgtgaagcttgaacctgcgagagctagacatcctcaacttcattatgaatcaaagctttatatgcttcttcaaggaggaactggtattccacatctaaaatggtatggggttgagggtgaatacaactgtatggtgattgaccttttgggtccgagtatggaggatttatttaattattgtagtcggaggttcaatctaaagacggttctaatgctcgcagatcaaatgatcaatagagttgagtatatgcatgtccggggatttcttcatcgtgacataaagcctgataactttttgatgggtcttggacgcaaagcgaaccaggtgtacatcattgactacggacttgcaaaaaagtatagagatctccaaactcatagacacattccctacagggaaaacaagaatcttactggaacagctcgatatgcaagtgttaacactcatcttggaattgagcaaagtaggagggacgatctggaatctcttggctacgtgcttatgtattttcttcgaggaagtcttccttggcaaggccttcgtgcgggtaccaaaaaacagaagtatgacaagatcagcgaaaagaaaaggcttacacctgtagaggttctctgtaaatcctttccacctgagttcacatcatacttcctctatgtacgatcattgcggtttgaagacaaaccagattatccatacctaaagaggcttttcagggatctctttattcgagaaggttatcagtttgactatgtatttgattggacaatcttgaagtatccacagtttagttcgggctccagctctagctccaagccaagatcaagcctgagaccagctatgaatcctccagtaccaattgccgaaagaccagataaaccttcagctggagctgggcaagacagtcgagatagattctcaggtgctttagaggcatatgctagaagaaatggctcaggaagcggtgtggtacaagctgatcgatctagaccaagaacctcagagaatgtattagcatcgtcaaaggatacaacaccacaaaactatgagagagtcgaaagaccaatctcttcaacaagacacgcaagttcttcaagaaaagctgttgtatcgagcgtacgagccacttcttcagctgatttcacagagaaccgctctagcagagttgtcccaagcaatggccgttcctcaaccgctcagaggactcagctcgtccctgacccaaccactagaccgtcatcttcttcttttacccgagctgcgccgtcgaggactgctcgtgacatcacgctccagagctttgagctactcaccatagggaatggaaagaggaagtga

SEQ ID NO: 195 - protein, 480 aa, Arabidopsis thaliana
MDRVVGGKYKLGRKLGSGSFGELFLGVNVQTGEEVAVKLEPARARHPQLHYESKLYMLLQGGTGIPHLKWYGVEGEYNCMVIDLLGPSMEDLFNYCSRRFNLKTVLMLADQMINRVEYMHVRGFLHRDIKPDNFLMGLGRKANQVYIIDYGLAKKYRDLQTHRHIPYRENKNLTGTARYASVNTHLGIEQSRRDDLESLGYVLMYFLRGSLPWQGLRAGTKKQKYDKISEKKRLTPVEVLCKSFPPEFTSYFLYVRSLRFEDKPDYPYLKRLFRDLFIREGYQFDYVFDWTILKYPQFSSGSSSSSKPRSSLRPAMNPPVPIAERPDKPSAGAGQDSRDRFSGALEAYARRNGSGSGVVQADRSRPRTSENVLASSKDTTPQNYERVERPISSTRHASSSRKAVVSSVRATSSADFTENRSSRVVPSNGRSSTAQRTQLVPDPTTRPSSSSFTRAAPSRTARDITLQSFELLTIGNGKRK

SEQ ID NO: 196 - DNA, 2044 bp, Arabidopsis thaliana
ttttttttttttttgggtctgatttcgtctctctttgttcttttcaccttttttttttgttttggttttgtctcttccgtttcattttgtgtttcttcaatctgatctaaagcttttgtctgaaaaaaagtgtcagactttctatgaagatgttgttggtcaatgggtgatttttagtttgtgttaaagcagaagcataagattacttggtgaatcgattacaattttgatttgattcagatatttgaagggttcttactagaatttgaattggggatctttgaatttcgatcaggcttttagagaggtagggaacattgaattgagatctgggtcaacttttggttttgttggggattagttgttttaagagatcgaagaaaggaggaagctttttgatttggtaacgatggatcgtgtggttggtggtaagtataagcttggacgtaaacttggaagtggatcatttggtgaactttttctaggggttaatgtacaaactggagaagaagttgctgtgaagcttgaacctgcgagagctagacatcctcaacttcattatgaatcaaagctttatatgcttcttcaaggaggaactggtattccacatctaaaatggtatggggttgagggtgaatacaactgtatggtgattgaccttttgggtccgagtatggaggatttatttaattattgtagtcggaggttcaatctaaagacggttctaatgctcgcagatcaaatgatcaatagagttgagtatatgcatgtccggggatttcttcatcgtgacataaagcctgataactttttgatgggtcttggacgcaaagcgaaccaggtgtacatcattgactacggacttgcaaaaaagtatagagatctccaaactcatagacacattccctacagggaaaacaagaatcttactggaacagctcgatatgcaagtgttaacactcatcttggaattgagcaaagtaggagggacgatctggaatctcttggctacgtgcttatgtattttcttcgaggaagtcttccttggcaaggccttcgtgcgggtaccaaaaaacagaagtatgacaagatcagcgaaaagaaaaggcttacacctgtagaggttctctgtaaatcctttccacctgagttcacatcatacttcctctatgtacgatcattgcggtttgaagacaaaccagattatccatacctaaagaggcttttcagggatctctttattcgagaaggttatcagtttgactatgtatttgattggacaatcttgaagtatccacagtttagttcgggctccagctctagctccaagccaagatcaagcctgagaccagctatgaatcctccagtaccaattgccgaaagaccagataaaccttcagctggagctgggcaagacagtcgagatagattctcaggtgctttagaggcatatgctagaagaaatggctcaggaagcggtgtggtacaagctgatcgatctagaccaagaacctcagagaatgtattagcatcgtcaaaggatacaacaccacaaaactatgagagagtcgaaagaccaatctcttcaacaagacacgcaagttcttcaagaaaagctgttgtatcgagcgtacgagccacttcttcagctgatttcacagagaaccgctctagcagagttgtcccaagcaatggccgttcctcaaccgctcagaggactcagctcgtccctgacccaaccactagaccgtcatcttcttcttttacccgagctgcgccgtcgaggactgctcgtgacatcacgctccagagttttgagctactcaccatagggaatggaaagaggaagtgagaggcttggctttatcgtgagcgtgttggaggacactgcgacattttaatggatggagactttgtttttatttcacgaaattatcggtttcctaatttaaggaataaatcgaacatcatttgattacaaattatatgtgataaagtatatggttttaacttgttaagctcatcacgaaaaaaaaaaaaaaaa

SEQ ID NO: 197 - protein, 480 aa, Arabidopsis thaliana; identical to SEQ ID NO: 195

SEQ ID NO: 198 - DNA, 1416 bp, Arabidopsis thaliana
atggatcttgtgattggtggaaaatttaagcttgggaggaaaattggtagtggttcctttggagagctttatctaggtataaatgttcaaaccggagaagaagttgctgtcaagctggaatctgtgaaaactaagcatccccaactccactatgagtcgaagttgtatatgctgcttcaaggaggaactggtgttcctaacctcaagtggtatggagttgaaggggattacaatgtaatggttattgaccttctaggtcctagtcttgaagacttgtttaactactgtaatagaaaactctctttaaaaaccgttctcatgcttgcggaccagctgattaacagagtcgagtttatgcatactagaggttttcttcaccgtgatattaaacctgacaacttcttaatgggccttggtcgcaaagcaaatcaggtttatatcattgattttggattggggaagaaatacagagaccttcagactcacaggcacataccgtacagagaaaacaaaaacctcactggaacagctcggtatgcaagtgtgaacactcaccttggagtcgaacaaagtcgaagagatgatttggaagcacttggttatgtgctgatgtatttcctcaaagggagcttaccctggcagggattaaaagctgggacaaagaagcagaagtatgacagaattagtgagaaaaaagtagcaactcctatagaggtcttgtgtaaaaatcaaccgtctgagtttgtttcgtactttcgttactgccggtctctacggtttgatgacaaacctgattactcttaccttaagaggctattccgcgacttgtttattcgagaaggttatcagtttgattatgtatttgactggacagttctgaagtatcctcagattggttccagctctggttctagttcacggacacggaatcatacaactgcaaacccgggcttaactgcaggagcttctctcgaaaaacaggagaggattgctggaaaggagactcgcgagaaccggttctcgggtgcagtagaggctttctcaagaaggcatccggcaacttctactactcgtgatcgctcggcatcaagaaactccgttgatgggcctttgtctaagcatccgcctggtgactcagaaagaccacgcagttcctcaagatatggaagctcttcgaggagagcaattccgtcaagctctcgaccaagttccgcaggtggaccaagcgatagtcgatcctctagccgtctggtgacatcaactggaggagtcggaacagtaagtaaccgcgcatcaacaagccagagaatccaagcaggaaacgaatccaggacgtcgtctttttcgcgtgctgctagaaacactcgagaagatccattaaggaggagcttagagcttctcactctcagaaaatga

SEQ ID NO: 199 - protein, 471 aa, Arabidopsis thaliana
MDLVIGGKFKLGRKIGSGSFGELYLGINVQTGEEVAVKLESVKTKHPQLHYESKLYMLLQGGTGVPNLKWYGVEGDYNVMVIDLLGPSLEDLFNYCNRKLSLKTVLMLADQLINRVEFMHTRGFLHRDIKPDNFLMGLGRKANQVYIIDFGLGKKYRDLQTHRHIPYRENKNLTGTARYASVNTHLGVEQSRRDDLEALGYVLMYFLKGSLPWQGLKAGTKKQKYDRISEKKVATPIEVLCKNQPSEFVSYFRYCRSLRFDDKPDYSYLKRLFRDLFIREGYQFDYVFDWTVLKYPQIGSSSGSSSRTRNHTTANPGLTAGASLEKQERIAGKETRENRFSGAVEAFSRRHPATSTTRDRSASRNSVDGPLSKHPPGDSERPRSSSRYGSSSRRAIPSSSRPSSAGGPSDSRSSSRLVTSTGGVGTVSNRASTSQRIQAGNESRTSSFSRAARNTREDPLRRSLELLTLRK

SEQ ID NO: 200 - DNA, 1407 bp, Arabidopsis thaliana
atggatcgtgtggttggtggtaagttcaagctcggacgaaagcttggaagtggctcatttggtgaaattttcctaggagtgaatgtacaaactggagaagaagtggctgttaagcttgaacctctccgagctaggcatcctcagcttcattacgagtcaaagctttatatgcttctccaaggaggaactggtattcctcacctcaaatggtttggtgttgagggtgaattcaactgtatggtgatcgaccttctcggtcctagtatggaagaatttttcaactattgcagtcgatccttctctcttaagacagttctaatgctcgcagatcaaatgataaatagagtggagtatatgcatgttaaaggcttccttcatcgtgatattaagccagataactttttgatgggtcttggacgcaaagcaaaccaggtgtacatcattgactatgggcttgccaagaagtatagagatcttcaaacacacaagcatattccatacagggaaaacaagaaccttactggaacagctcgatatgcaagtgttaacacccatcttggaattgagcaaagtagaagggatgatctggaatctctaggctatctgcttatgtattttcttcgaggaagccttccttggcaaggccttcgtgcaggtaccaaaaagcagaagtatgacaagatcagtgaaaagaaaagactaacaccagtggaggtcctctgtaaaaactttccacctgagttcacatcgtattttctctatgtgcgttcactacggtttgaagacaaaccagattattcatacctaaagaggcttttcagagacctatttatccgagaaggttatcagtttgactatgtatttgattggacaatattgaggtatccacagttcggctccagttccagctcgaattccaaaccaagaccaactttaagaccagctatgaatattccagtaccatctgccgacaaagcggaaaagcctccaattggacaggacagccgtgagaggttctcaggtgttttcgaggcatacaccagaagaaatggctcaggaaccggcgttcaagctgatcagtctagtagaccaagaacctcagagaatgttcttgcatccaaggacacgcaaaaccaggagagaccaaactctttatctaggaacctgagttcgtcaagaaaagcaattgctgggtcaagtgttcgagccacttcctcagctgatttcacagagaatcgattaagcagactcatcccaaacaatgatcggtcttctacaactctgaggacccagttcgctccttcgtcctcctcagtagccacaaaagctgcaccaacgagagccgctcgtgacattaccctccagagccttgagctcctcagtattgggaacagcaagaggaagtga

SEQ ID NO: 201 - protein, 468 aa, Arabidopsis thaliana
MDRVVGGKFKLGRKLGSGSFGEIFLGVNVQTGEEVAVKLEPLRARHPQLHYESKLYMLLQGGTGIPHLKWFGVEGEFNCMVIDLLGPSMEEFFNYCSRSFSLKTVLMLADQMINRVEYMHVKGFLHRDIKPDNFLMGLGRKANQVYIIDYGLAKKYRDLQTHKHIPYRENKNLTGTARYASVNTHLGIEQSRRDDLESLGYLLMYFLRGSLPWQGLRAGTKKQKYDKISEKKRLTPVEVLCKNFPPEFTSYFLYVRSLRFEDKPDYSYLKRLFRDLFIREGYQFDYVFDWTILRYPQFGSSSSSNSKPRPTLRPAMNIPVPSADKAEKPPIGQDSRERFSGVFEAYTRRNGSGTGVQADQSSRPRTSENVLASKDTQNQERPNSLSRNLSSSRKAIAGSSVRATSSADFTENRLSRLIPNNDRSSTTLRTQFAPSSSSVATKAAPTRAARDITLQSLELLSIGNSKRK

SEQ ID NO: 202 - DNA, 1329 bp, Arabidopsis thaliana
atggatcatgtaatcggtggcaagttcaagttaggtaggaagattggtagtggatcattcggtgaactttatattgggattaatgttcaaactggagaagaagttgctcttaagctggaacctgtgaagacaaagcatcctcagctccattatgaatcaaaagtatacatgcttcttcaaggagggacgggtgttccgcatatcaaatggttcggtgttgagggtaactacaattgtatggctattgaccttcttggtccaagcttggaagacttgttcaactattgcactcggagtttttctttgaaaactgttctaatgcttgctgatcagttaataaacagagttgagtacatgcactctcgaggatttcttcaccgtgatattaaaccggataactttttgatgggtctcggtcgcaaagcaaaccaagtgtacattattgattatgggcttgctaaaaagtatagagatcttcagacacacaagcatataccttacagggaaaataagaatctgactggaactgctaggtatgcaagtgtcaacacacaccttggcattgagcaaagtagacgagatgatctggagtctcttggttatgttctgatgtattttatacgaggaagtttaccatggcaaggtctaaaagctggtactaagaaacagaaatacgagaagataagtgaaaagaagatgcttactcccgtagaggttctttgcaagtcatatccatccgagttcacatcatatttccattactgccgttcattgaggtttgaggataaaccagattattcatatctgaaaagacttttcagggacctttttattcgggaaggttatcagtttgactatgtgtttgattggacaatcttgaaatatcctcagagtggctctatttcaaaaccaaggccaaatcctaaaccagctctagaccctccaggaccatctgcagaacgaaatgaaaagcctatagtggggcaggatctacgagaaagattctcaggtgcagttgaagcattcgctagacgaaatgtaccgagtcatggcattcgcccgaagcacattttttctgatgatgcttccaaagaagtgcaagtgtctgaaaaaacccgaaatgagattgctacaaagatggcagtgatgtctagcagccaacctggctcatcaggtgagctgagtgagaaccgctcaagtaaacttttttcaagcagtgcccaaaagattcaaccggtgcaagaaactaagttatctgcaaggcttgggcgtgatgacggcctgagaagcttcgatatgcttactatcggttccggaaagcggaaatga

SEQ ID NO: 203 - protein, 442 aa, Arabidopsis thaliana
MDHVIGGKFKLGRKIGSGSFGELYIGINVQTGEEVALKLEPVKTKHPQLHYESKVYMLLQGGTGVPHIKWFGVEGNYNCMAIDLLGPSLEDLFNYCTRSFSLKTVLMLADQLINRVEYMHSRGFLHRDIKPDNFLMGLGRKANQVYIIDYGLAKKYRDLQTHKHIPYRENKNLTGTARYASVNTHLGIEQSRRDDLESLGYVLMYFIRGSLPWQGLKAGTKKQKYEKISEKKMLTPVEVLCKSYPSEFTSYFHYCRSLRFEDKPDYSYLKRLFRDLFIREGYQFDYVFDWTILKYPQSGSISKPRPNPKPALDPPGPSAERNEKPIVGQDLRERFSGAVEAFARRNVPSHGIRPKHIFSDDASKEVQVSEKTRNEIATKMAVMSSSQPGSSGELSENRSSKLFSSSAQKIQPVQETKLSARLGRDDGLRSFDMLTIGSGKRK

SEQ ID NO: 204 - DNA, 1374 bp, Arabidopsis thaliana
atggatcggaatcaaaagatggatcacgttatcggcgggaagtttaagttgggtaggaagcttggaagtggatcattcggtgaactttatttagggatcaatattcaaactggagaagaagtcgcagttaagctggaacctgtgaagacgaggcatcctcaactgcagtatgaatcgaaaatatatatgtttcttcaaggaggaacgggtgttccccatctgaaatggtttggagttgagggtgaatacagttgcatggttatcgatcttcttgggccaagcttggaggacttattcaattactgcaagcgaatattttcattaaaatctgttttaatgcttgcagatcaattgatatgtagagttgagtatatgcattcgcggggttttcttcaccgcgatattaaaccagacaactttttgatgggtcttgggcgcagagcaaaccaggtgtatatcattgattatggccttgctaaaaaatacaaggatcttcagacacaaaagcatataccatacagggaaaacaagaatcttacaggaactgctcggtatgcaagtgtgaacacacaccttgggattgagcaaagtagaagagatgatctggagtcacttggttatgtgttgatgtattttctacgaggaagtcttccgtggcaaggtttaaaagctggtacgaagaagcagaaatatgacaagattagtgaaaagaagatgcttacttctgtagagactctttgcaagtcgtatccatcagagttcacatcgtacttccattactgtcgttcattgagatttgaggacaaaccggattattcatatctgagaagactttttagggatcttttcattcgtgaaggttatcagcttgattatgtgtttgattggacaatctcgaagtatcctcagattggctctagttcgagaccaaggccaactccaagaccagcgttggaccctccaggaccacctgcagaaagagctgaaaagcctacagtcggacaggacctgcgaggaagatttacaggtgcaattgaggcattcaccagacgaaatgtttcaagccaaggcgctcttggtgatcgctctagacacagatcttctgatgatataccctcttctgccaaggaagtgcacgagtctcgaaatggaagtacctcaaagagaggtgtgatatcaagcaccagacctggctcatcagctgaaccaagcgagaaccactcaagccgactattttcaagtggttcacgtcatgccacaacccaacgggttccacagagctatgaatctgcagctgcagcaaggcctgggcatgaggatgccattagaaacttcgagctccttaccatcggctctggaaagaagaggaaatga

SEQ ID NO: 205 - protein, 457 aa, Arabidopsis thaliana
MDRNQKMDHVIGGKFKLGRKLGSGSFGELYLGINIQTGEEVAVKLEPVKTRHPQLQYESKIYMFLQGGTGVPHLKWFGVEGEYSCMVIDLLGPSLEDLFNYCKRIFSLKSVLMLADQLICRVEYMHSRGFLHRDIKPDNFLMGLGRRANQVYIIDYGLAKKYKDLQTQKHIPYRENKNLTGTARYASVNTHLGIEQSRRDDLESLGYVLMYFLRGSLPWQGLKAGTKKQKYDKISEKKMLTSVETLCKSYPSEFTSYFHYCRSLRFEDKPDYSYLRRLFRDLFIREGYQLDYVFDWTISKYPQIGSSSRPRPTPRPALDPPGPPAERAEKPTVGQDLRGRFTGAIEAFTRRNVSSQGALGDRSRHRSSDDIPSSAKEVHESRNGSTSKRGVISSTRPGSSAEPSENHSSRLFSSGSRHATTQRVPQSYESAAAARPGHEDAIRNFELLTIGSGKKRK

SEQ ID NO: 206 - DNA, 1440 bp, Arabidopsis thaliana
atggacttgaaaatggataatgttattgggggaaagtttaaacttggtcggaagatcggtggtggctcttttggagaactttttcttgccgtaagtttgcaaaccggagaggaagcagctgttaagctggagcctgcgaaaactaagcatccccaacttcattatgagtcgaagatatacatgcttctacaaggaggaagtggcatccccagccttaagtggtttggggttcagggagactacaatgcgatggtcattgatctgcttgggccgagtttggaagacttgttcaactactgcaataggaggcttactttgaaggcagttttgatgcttgcagatcaactgattagcagagttgaatatatgcattcaagggggtttcttcaccgtgacatcaaacctgacaatttcttgatgggacttggtcgcaaagcaaaccaggtgtatatcattgattttgggcttgcaaagaagtatagggatctccaaacacataggcatatcccctatagagaaaacaagaaccttacgggcacagctcggtatgctagtgtcaacactcacctaggagttgagcaaagtaggagggatgatctggagtctcttggttacgtactcatgtatttcctgagaggaagcttaccgtggcagggactaaaagctggcacaaagaagcaaaagtatgacagaattagcgagaagaaagtatcaactcctatagaggtcttgtgcaagtcatatccacccgaattcgtatcatactttcaatactgcagatctctgcgattcgaagacaaaccagactactcatatctaaagagacttttccgagacttgtttatccgtgaaggttatcagtttgattatgtattcgactggactgcattgaaacaccctcagagtagtgccaggtcccattccagtacacatgaaaggcatcgtaccggtaaaccagggatgggtgcgggaccgtctgctgaaaaacctgaaaggatttcagtagggaacatccgcgataaattctcaggtgcggtcgaagcatttgcgagaaggaacgttagaggacccagtccccatcaaaaccataccagacatcgaactcttgacgaaattccttcaatgaaacctgctgtgaatatggtatctgagaaaggaagaaacacttccagatacggcagtgcttcgaggagagcagtagcctcaggaagtagaccaagctcatcaggtgaacaaagggagagccgggactcgagccgcgtagcctcaagcggtggcggtgtccgaccatcagtcttccaaagaacccaagcagcagctgctgtgagtggatacgagtcaaagacagcatctgcctttaaccgcgaccgagtagccgcttcaagaacagcacgagacgaggctctcagaagcttcgagcttctttcgatccgcaaatga

SEQ ID NO: 207 - protein, 479 aa, Arabidopsis thaliana
MDLKMDNVIGGKFKLGRKIGGGSFGELFLAVSLQTGEEAAVKLEPAKTKHPQLHYESKIYMLLQGGSGIPSLKWFGVQGDYNAMVIDLLGPSLEDLFNYCNRRLTLKAVLMLADQLISRVEYMHSRGFLHRDIKPDNFLMGLGRKANQVYIIDFGLAKKYRDLQTHRHIPYRENKNLTGTARYASVNTHLGVEQSRRDDLESLGYVLMYFLRGSLPWQGLKAGTKKQKYDRISEKKVSTPIEVLCKSYPPEFVSYFQYCRSLRFEDKPDYSYLKRLFRDLFIREGYQFDYVFDWTALKHPQSSARSHSSTHERHRTGKPGMGAGPSAEKPERISVGNIRDKFSGAVEAFARRNVRGPSPHQNHTRHRTLDEIPSMKPAVNMVSEKGRNTSRYGSASRRAVASGSRPSSSGEQRESRDSSRVASSGGGVRPSVFQRTQAAAAVSGYESKTASAFNRDRVAASRTARDEALRSFELLSIRK

SEQ ID NO: 208 - DNA, 1431 bp, Arabidopsis thaliana
atggatctcgtgatcggtgggaaatttaagcttgggaagaaaattggtagtggatcatttggagagctttatctaggtgtaaatgtccaaacaggagaagaagttgctgtcaagctggaaaatgtgaagaccaaacatccacaacttcattatgagtcaaagttgtatatgctgcttcaaggaggatctggtattccgaacatcaagtggtttggagttgaaggtgactacagcgtaatggttattgaccttctaggtcctagtcttgaagacttgtttaactactgcaacagaaagttaacattgaaaactgttctcatgcttgccgaccaattacttaacagggttgagtttatgcatactcgaggtttccttcaccgtgatataaaacctgacaactttttaatgggccttggacgcaaagcaaatcaggtgtatatcattgattttggactagggaagaaatacagagaccttcagactcacaagcacattccttacagagaaaacaaaaatcttactgggacagctcggtatgcaagtgttaacactcaccttggagtcgaacaaagtcgaagggatgatttggaatcacttggttatgttcttatgtattttctcaaaggaagcttaccttggcagggattaaaagctgggacaaagaagcagaagtatgacagaatcagcgagaaaaaagtgtcaactcctatagaggtattgtgtaaaaaccaaccgtccgagttcgtttcatactttcattactgccgatctttacggtttgatgacaaacctgattactcttacctcaagaggcttttccgtgacttgtttatccgagaaggttatcaattcgattatgtatttgactggacagtcttaaagtatcctcaaatcggatccagctctggttctagttcacgaacaaggcatcatacaacagcgaaacccggattcaacgcagatcctattgaaagacaagagaggatcctaggaaaggaaacaacccgatataaaatcccaggtgcagtggaggcattctccagaagacacccgactacaacttcttcgcctcgagatcgttctagatcaagaaactcagacgacggacctttctctaagcagacacatggagactccgaaagagcaaacagttcctcaagatatagagcatcttcttctaggaaagccgttgctgcttcaagctcccggccaagttctgcaggtggaccaagcgaaagccgaacttcaagtcgtctggtttcctcaagcggtggtggtggcagcggcagtggaaatggccgtccctcaactagccagagagtgcaagctggatatgaatccaagactctgtctttctctcgtgcaacagcggcaagaaacactcgggaagatcaattaagaagcttcgagcttctctctcttcggaaataa

SEQ ID NO: 209 - protein, 476 aa, Arabidopsis thaliana
MDLVIGGKFKLGKKIGSGSFGELYLGVNVQTGEEVAVKLENVKTKHPQLHYESKLYMLLQGGSGIPNIKWFGVEGDYSVMVIDLLGPSLEDLFNYCNRKLTLKTVLMLADQLLNRVEFMHTRGFLHRDIKPDNFLMGLGRKANQVYIIDFGLGKKYRDLQTHKHIPYRENKNLTGTARYASVNTHLGVEQSRRDDLESLGYVLMYFLKGSLPWQGLKAGTKKQKYDRISEKKVSTPIEVLCKNQPSEFVSYFHYCRSLRFDDKPDYSYLKRLFRDLFIREGYQFDYVFDWTVLKYPQIGSSSGSSSRTRHHTTAKPGFNADPIERQERILGKETTRYKIPGAVEAFSRRHPTTTSSPRDRSRSRNSDDGPFSKQTHGDSERANSSSRYRASSSRKAVAASSSRPSSAGGPSESRTSSRLVSSSGGGGSGSGNGRPSTSQRVQAGYESKTLSFSRATAARNTREDQLRSFELLSLRK

SEQ ID NO: 210 - DNA, 1398 bp, Brassica napus
atggatcgagtggttggtggcaagttcaagcttggtcgaaagcttggaagtggatcctttggtgaaatctttctaggggtgaatgtacaatctggagatgaagttgctgttaagctcgaacctcttagaagtaggcatcctcagcttcattacgagtcaaagatttatatgtttctccaaggaggatctggtattccacaccttaaatggtttggtgttgagggtgaatacaactgtatggtgatcgaccttcttggtcctagtctggaggagtttttcaactattgcagccgatctttctctctaaagactgttctaatgctcgctgatcagatgttaaacagagtcgagtatatgcatatacgaggctttctccatcgtgatattaagcctgataactttctgatgggcgttggccgcagagcaaaccaagtttacatcattgactatggcttagcaaaaaagtatagagatcttcaaacacacaaacatattccttacagagaaaacaagaatcttacaggaacggctcgatatgcaagtgttaacactcatctcggaattgagcaaagtaggagggatgatctggagtctcttggctatatgcttatgtattttctccgaggaagccttccatggcaaggccttcgtgcaggaaccaaaaaggaaaagtatgacaggatcagtgaaaagaaaagactcacaccagtcgaggtcctctgtaaaagctttccacctgagttcacttcctacttcctctacgtgcgctcgttacggtttgaagacaaaccagactattcctacttaaagaggcttttcagagacttattcatccgagaaggttatcagtttgactatgtattcgattggactatcttgaagtatccgcagttcgggtccagctccagttccagttctagttccaagccaagaccgggcctaagaccagctctgaacattccagcaccatctgctgagaaagttgaaaagccttcaactgggaaagagactcgcgatagatactcaagtgttttcgaggcatacactagaagaactggcttaggaaccggccttcaagctgatcggtctagtagaccgagaacctcagagaatgttcttgcatctagagacgcgctaaaccaggagagatcaatgacttcatctaggaaccagagttcttcgagaaaagcagtagcgggatcaagtgttcgagctacttcctcagctgatttcgcagagaaccgaaccagcagcaggctcgtcccaagcaacggtcgttcctcgacaacgcagaggacacagtttgcgccttcttcttcctcaaaggctgcaccgtcgagaattcctcctgacgttacactagagtttctcagtattgggaacgggaagaggaagtga

SEQ ID NO: 211 - protein, 465 aa, Brassica napus
MDRVVGGKFKLGRKLGSGSFGEIFLGVNVQSGDEVAVKLEPLRSRHPQLHYESKIYMFLQGGSGIPHLKWFGVEGEYNCMVIDLLGPSLEEFFNYCSRSFSLKTVLMLADQMLNRVEYMHIRGFLHRDIKPDNFLMGVGRRANQVYIIDYGLAKKYRDLQTHKHIPYRENKNLTGTARYASVNTHLGIEQSRRDDLESLGYMLMYFLRGSLPWQGLRAGTKKEKYDRISEKKRLTPVEVLCKSFPPEFTSYFLYVRSLRFEDKPDYSYLKRLFRDLFIREGYQFDYVFDWTILKYPQFGSSSSSSSSSKPRPGLRPALNIPAPSAEKVEKPSTGKETRDRYSSVFEAYTRRTGLGTGLQADRSSRPRTSENVLASRDALNQERSMTSSRNQSSSRKAVAGSSVRATSSADFAENRTSSRLVPSNGRSSTTQRTQFAPSSSSKAAPSRIPPDVTLEFLSIGNGKRK

SEQ ID NO: 212 - DNA, 1446 bp, Brassica napus
atggacttgaaaatggataatgtaatcggcggcaagtttaagcttggtcgtaagatcggcggtggctctttcggagagctttttctaggtgtaagcgtgcagaccggagaagaagtcgctgtaaagctggagcctgcgaagactaagcatccacagcttcattatgagtccaagatatacatgcttctacaagggggaactggcatccctagcctcaagtggtttggggttcagggagactacaatgcgatggtgattgatctgcttggacctagtttggaggatttgttcaactattgtaataggaaactcactttgaaggcagttctgatgcttgcggatcaactgattagcagagttgagtatatgcattcaagaggatttctacaccgagacataaaaccagacaatttcttgatgggacttggtcgcaaagcaaaccaggtgtatgtcattgattttggccttgcaaagaagtatagggatctccaaacacatagacacatcccctacagagaaaacaagaaccttacgggcacagctcggtatgctagcgtcaacactcaccttggtgttgagcaaagtcgaagggatgatctggagtctcttggttacgtgctcatgtatttcctcagaggaagcctgccatggcagggactaaaagctggcacaaagaagcagaagtatgacagaatcagtgagaagaaagtttcaactcctatagaggtcttgtgcaagtcctatccacaagaattcgtatcatactttcagtactgcaggtctttgcggttcgaagacaaaccagactactcatatttaaggaggctgttccgagatttgtttatccgcgaaggttatcagtttgactatgtattcgactggactgcgttgaagcaccctcagagtagttccagttcccgttccagctcccacggaaggcatcgtactggtaaaccaggtgttgctgctggaccatctgctgaaaaacctgaaaggatctcagttgggagggagatccgcgacagattctcaggtgcagttgaagcattcgcgagaagaaacgctacgggagcaagtccccatcaaaaccaaaccagacatcgaactcttgacgatgttcctccaccaatgaaacctgctgtgaatatggtatctgagaaaggtagaagcacttcaagatacggaagtgcttcgaggagagcggtggcctctggaagtagaccaagctcgtctggtgaacaaggggatagccgcggttcgagccgtgtggcttcgagcggtggaggtggcagaccatccgtgtttcagagaaaccaggtggcagctgctgtgagcggatacgactctaaggcggcctctgtctttaaccgcaaccgagtgtcctcttctaggtcggcacgtgacgaggctctccgaagctttgagcttctttcgatccgcaaatga

SEQ ID NO: 213 - protein, 481 aa, Brassica napus
MDLKMDNVIGGKFKLGRKIGGGSFGELFLGVSVQTGEEVAVKLEPAKTKHPQLHYESKIYMLLQGGTGIPSLKWFGVQGDYNAMVIDLLGPSLEDLFNYCNRKLTLKAVLMLADQLISRVEYMHSRGFLHRDIKPDNFLMGLGRKANQVYVIDFGLAKKYRDLQTHRHIPYRENKNLTGTARYASVNTHLGVEQSRRDDLESLGYVLMYFLRGSLPWQGLKAGTKKQKYDRISEKKVSTPIEVLCKSYPQEFVSYFQYCRSLRFEDKPDYSYLRRLFRDLFIREGYQFDYVFDWTALKHPQSSSSSRSSSHGRHRTGKPGVAAGPSAEKPERISVGREIRDRFSGAVEAFARRNATGASPHQNQTRHRTLDDVPPPMKPAVNMVSEKGRSTSRYGSASRRAVASGSRPSSSGEQGDSRGSSRVASSGGGGRPSVFQRNQVAAAVSGYDSKAASVFNRNRVSSSRSARDEALRSFELLSIRK

SEQ ID NO: 214 - DNA, 1407 bp, Citrus sinensis
atgtttgccgacgggaaattgagaatggaccatgtgattggtggcaagtttaagttggggaggaagatcggtagtggctccttcggagagctttatttaggtgtcaatgtacaaactggagaggaaattgctgtcaagctggaacttgtgaagaccaagcatccacagcttcattacgaatcaaaattgtatatgcttcttcagggaggaactggaattcctcacctcaagtggtttggagttgaaggggactacaatatcatggttattgatcttcttggaccaagtttagaagatttattcaattattgcaatagaaagttctctttgaaaacagtattgatgcttgcagatcaattaattaatagagtggaatacatgcactcaaggggctttcttcaccgtgatataaagcctgacaatttcttaatgggccttggacgcaaagcaaatcaggtctacataattgactatggccttgcaaagaagtatagggatcttcaaactcataagcacatcccatacagggaaaataagaatctcaccggcacagctcgctatgcaagtgtaaatactcaccttggagttgaacaaagccgaagggatgatttagagtctcttggttatgtccttatgtatttccttagaggaagccttccctggcaaggattaaaagctggcacaaaaaagcaaaaatatgataagatcagcgaaaagaaggtgtcaactccgatagaggtgctctgtaaatcatacccatctgagtttgtatcatactttcattactgtcgatcgttgcggtttgaggacaaaccagattattcatatttaaagaggcttttccgcgacttatttattcgagaaggttttcagtttgactatgtatttgattggactgtattaaagtaccctcagattggttccagctctaaaggaaggcattccagtgggaaggtaggcttaaccccaggaccatctgctgaaagaccagaaaggggttcagttgggaaggagattagggacaaattgtctggtgcagttgaagcattttcaagaaaaaatgctgctggtactcctcatcgtgatcatcccagacacaagagttcagatgatggtccttcatctaagcatgtgaaccctgattctgaaaaaggacgaagcttttcccggtatggaagcacttcaagaaaagctgtaatcgcaagcactaaacctggttcatctggtgaattcagtgagtgtcgctctagccgactagtctcaagcagtggccgcttgtctaccacgcaaagattgcaatctgggtatgattccaggcaatcttcatttaatcgcactgctggtggaagaatctgcacccgtgatgatcctattcggagttttgagatgctgtcaatcaggaaatga

SEQ ID NO: 215 - protein, 468 aa, Citrus sinensis
MFADGKLRMDHVIGGKFKLGRKIGSGSFGELYLGVNVQTGEEIAVKLELVKTKHPQLHYESKLYMLLQGGTGIPHLKWFGVEGDYNIMVIDLLGPSLEDLFNYCNRKFSLKTVLMLADQLINRVEYMHSRGFLHRDIKPDNFLMGLGRKANQVYIIDYGLAKKYRDLQTHKHIPYRENKNLTGTARYASVNTHLGVEQSRRDDLESLGYVLMYFLRGSLPWQGLKAGTKKQKYDKISEKKVSTPIEVLCKSYPSEFVSYFHYCRSLRFEDKPDYSYLKRLFRDLFIREGFQFDYVFDWTVLKYPQIGSSSKGRHSSGKVGLTPGPSAERPERGSVGKEIRDKLSGAVEAFSRKNAAGTPHRDHPRHKSSDDGPSSKHVNPDSEKGRSFSRYGSTSRKAVIASTKPGSSGEFSECRSSRLVSSSGRLSTTQRLQSGYDSRQSSFNRTAGGRICTRDDPIRSFEMLSIRK

SEQ ID NO: 216 - DNA, 1407 bp, Glycine max
atgtcttctttgatgatggatcatgttattggtgggaagtttaaactgggaaggaaaattgggagtgggtcttttggggagctttatatagctgttaatatacaaaccggagaggaggtggctgtcaagctggaacctgtgaagaccaagcatccccagcttcactatgagtcaaaattgtatatgcttcttcaaggaggaacggggattccccatctcaagtggtttggagtagagggagactacaatgtcatggcaatcgatcttcttggaccaagtctggaagatttgttcaattattgcaaccggaagttaacattgaagacagtgttaatgcttgctgatcaattaattaacagagttgaatatatgcattctagaggtttccttcaccgtgacatcaagccagacaattttttaatgggcctaggacgtaaagcaaaccaggtgtacatcattgactatggccttgcaaaaaaatatagggatcttcagactcataggcacataccatacagggaaaacaagaaccttacaggcacagcccggtatgcaagtgtcaacacccatcttggaattgaacaaagcagaagggatgatctggaatctcttggttatgtgctcatgtacttcttaagaggaagtcttccctggcagggactgaaggctggcaccaaaaaacaaaaatatgataaaatcagtgagaagaaaatgtcaacttcgttagaggggctctgcaagtcatatccctcagagtttgtatcatattttcaatattgccgaacattgcgatttgaagacaagcctgattattcatatttaaagaggctgtttcgagatttatttattagagaaggctatcaatttgactatgtttttgattggactatattgaagtatccgcagattggcggcagcagctctagagggcggcatgaaagtggcaaggcagctatgcatgcaggaccatctgtacaaaagccagaaaaagtatcagttgggaaagagattcgagaaaaattctctggtgctgttgaagctttctcccggaggaacccaacaagtcctagtcctcgtggtgatcactccaaacgtaggagttttgaggaagtagcagtacacaaagatgtgtatcatgatcaagagaagggacgcaattcgtcccgatatggcagcagttcaagaagacccataatctcatcgtcaaccaggccaagttcctctggtgatcatactgacagtcgtactggccggctaacctcaagtggaagccgacaatctgccacacatagaaatattcaacctatgcacgagacaaaacaaccaacttacacacgctctggatccaccagaggcaaccgtgatgatcctctgcggagttttgagctcctctctatcaggaagtaa

SEQ ID NO: 217 - protein, 468 aa, Glycine max
MSSLMMDHVIGGKFKLGRKIGSGSFGELYIAVNIQTGEEVAVKLEPVKTKHPQLHYESKLYMLLQGGTGIPHLKWFGVEGDYNVMAIDLLGPSLEDLFNYCNRKLTLKTVLMLADQLINRVEYMHSRGFLHRDIKPDNFLMGLGRKANQVYIIDYGLAKKYRDLQTHRHIPYRENKNLTGTARYASVNTHLGIEQSRRDDLESLGYVLMYFLRGSLPWQGLKAGTKKQKYDKISEKKMSTSLEGLCKSYPSEFVSYFQYCRTLRFEDKPDYSYLKRLFRDLFIREGYQFDYVFDWTILKYPQIGGSSSRGRHESGKAAMHAGPSVQKPEKVSVGKEIREKFSGAVEAFSRRNPTSPSPRGDHSKRRSFEEVAVHKDVYHDQEKGRNSSRYGSSSRRPIISSSTRPSSSGDHTDSRTGRLTSSGSRQSATHRNIQPMHETKQPTYTRSGSTRGNRDDPLRSFELLSIRK

SEQ ID NO: 218 - DNA, 1359 bp, Glycine max
atggatcatgttattggtggaaaattcaagcttgggaggaagattgggagtggatcgtttggagagctttacttaggtgttaatgtgcaaagtggggaggaagtggctgtcaagctggaatctgtgaaaaccaagcacccacagcttcactatgagtctaaactgtatatgcttcttcaagggggaactggtataccccatctaaaatggtttggagttgagggtgactacaatgtcatggttattgacctccttgggccaagtcttgaagacttgtttaactattgcaatagaaaattatccctgaaaacagttctgatgctggcagatcagctaataaacagagttgagtacatgcactctcggggttttctgcatcgtgatataaagcctgacaactttttaatgggcttaggccgcaaggcaaatcaggtatacataattgattatggcctggcaaaaaagtatcgggatcttcaaactcacaagcatattccatacagggaaaacaaaaatctcactggaactgctcggtatgcaagtgttaatactcatctgggagttgaacaaagcagaagagatgatctagaatctctcggatatgtgctcatgtattttttgagaggaagtctcccatggcaaggcttgagagctggcaccaaaaagcaaaaatatgacaagataagtgagaagaagatgcttactccaatagaggtcttatgcaagtcatatccattggaattcacatcatacttccactactgccgatcattgcggtttgaagataagcctgattattcttatcttaagagactctttcgggacctatttatccgagaaggttatcagtttgattatgtatttgattggactatgctgaagtatcctcaaattggatccagttctagagcccgaccaagtgggaaaccagtcataaacccaggacaatcaggggagagaatagaacggccttcaggtgcagttgaggcatttgcaaggaggaatggctctggacttgttctacatagtgagctttctaggcataagtcttcagatgatgtgccatcttccaaagacgtgcaagctaattctgagaggcctcgcagctcttctcgtaatggcagttcttcaaaaaagcctgtcttgtctagcagccggccaagctcttctggtgagcctagtgaaagccgttctagccgactggtcttaagcagtggccgactatcaacaactcagagacttcaacctggttttgaatccaaaacatctttatcacgggcttcagcaacaagaggtggtcgtgatgatacactcaggagctttgaactcctgtcacttggttcaggaaaaaggaaatga

SEQ ID NO: 219 - protein, 452 aa, Glycine max
MDHVIGGKFKLGRKIGSGSFGELYLGVNVQSGEEVAVKLESVKTKHPQLHYESKLYMLLQGGTGIPHLKWFGVEGDYNVMVIDLLGPSLEDLFNYCNRKLSLKTVLMLADQLINRVEYMHSRGFLHRDIKPDNFLMGLGRKANQVYIIDYGLAKKYRDLQTHKHIPYRENKNLTGTARYASVNTHLGVEQSRRDDLESLGYVLMYFLRGSLPWQGLRAGTKKQKYDKISEKKMLTPIEVLCKSYPLEFTSYFHYCRSLRFEDKPDYSYLKRLFRDLFIREGYQFDYVFDWTMLKYPQIGSSSRARPSGKPVINPGQSGERIERPSGAVEAFARRNGSGLVLHSELSRHKSSDDVPSSKDVQANSERPRSSSRNGSSSKKPVLSSSRPSSSGEPSESRSSRLVLSSGRLSTTQRLQPGFESKTSLSRASATRGGRDDTLRSFELLSLGSGKRK

SEQ ID NO: 220 - DNA, 1371 bp, Glycine max
atgtctgtgatgatggatcatgttattggtgggaagtttaaactgggaaggaaaatcgggagtgggtcttttggggagctttatatagctgtcaatgtacaaactggagaggaggtggctgttaagctggaacctgtgaagaccaggcatccacagcttcactatgagtcaaaactgtatatgcttcttcaaggaggaacggggattccccatctcaagtggtttggagttgagggagactacaatgtcatggctatcgaccttcttggaccaagtctggaagatttattcaattattgtaatcggaagttcacattgaagacagtgttaatgcttgcggatcaattgattaacagagttgaatatatgcattcaagaggtttccttcaccgtgacataaagccggacaattttctaatgggtctaggacgaaaggcaaatcaagtgtatgccattgactatggccttgcaaaaaaatatagggatcttcagactcataggcacataccatacagggaaaacaagaaccttacaggcacagcacgctacgcaagtgtcaacactcatcttggaattgaacaaagcagaagggatgatctggaatctcttggttatgtgctcatgtatttcttaaaaggaagtcttccctggcaaggactgaaagctggcaccaaaaaacaaaaatatgataaaatcagtgagacaaaggtgtcaactcccatagaggtgctctgcaaatcatatccgtctgagtttgtatcatacttccaatattgccgatcactgcaatttgaggacaagccagattattcgtatttaaagagacttttccgagacctatttattcgagaaggctaccagtttgattacatttttgactggactatgttaaagtatccacagatcagtggcagctccagagggcggcatgtcactggcaaggcagctatgcatgcaggtccacatgtacaaaaagcagaaaagatctcagttgggaaagaaattcgagagaaattttctggtgcagttgaagtgttctcctggaggaaccctgcaaatgctagtcctcgtggtgatcacaccaaacatagaagttttgaggatgcaccagtgcaaaaggatttgcactatgcgcaacacaattccactcgatatggcagcagttcaagaagagccatgatctcatcgaacaggccaatatcctcaggtgaccatactggcaggcaaaccataactgggagccgtccatctggtgctcacagagttcaaccagtgtatgacaccaaacaagcaacttatacgcatggtggctctataagaggccgtgatgatcctctgcggaactttgagctcctcaatatcaggaagtaa

SEQ ID NO: 221 - protein, 456 aa, Glycine max
MSVMMDHVIGGKFKLGRKIGSGSFGELYIAVNVQTGEEVAVKLEPVKTRHPQLHYESKLYMLLQGGTGIPHLKWFGVEGDYNVMAIDLLGPSLEDLFNYCNRKFTLKTVLMLADQLINRVEYMHSRGFLHRDIKPDNFLMGLGRKANQVYAIDYGLAKKYRDLQTHRHIPYRENKNLTGTARYASVNTHLGIEQSRRDDLESLGYVLMYFLKGSLPWQGLKAGTKKQKYDKISETKVSTPIEVLCKSYPSEFVSYFQYCRSLQFEDKPDYSYLKRLFRDLFIREGYQFDYIFDWTMLKYPQISGSSRGRHVTGKAAMHAGPHVQKAEKISVGKEIREKFSGAVEVFSWRNPANASPRGDHTKHRSFEDAPVQKDLHYAQHNSTRYGSSSRRAMISSNRPISSGDHTGRQTITGSRPSGAHRVQPVYDTKQATYTHGGSIRGRDDPLRNFELLNIRK

SEQ ID NO: 222 - DNA, 1344 bp, Helianthus argophyllus
atggatcgtgttgttggtggtaagtttaagcttgggagaaagattgggagtggatctcttggtgagctttatttaggtgttagtattcagactggggaagaagttgctgttaagctggaacccaccaaaacgaagcatcctcaacttcattatgaatcaaaagtttatatgctgcttcagggaggaatgggagtacctagccttaaatggtatggagttgagggcgattacaatgtcatggtgatcgacctactcggaccaagccttgaagacctttttaactattgcaatagaaagttttccttgaagacagttttaatgcttgcagatcaattaataaatagagttgagtacatgcatgcaagaagctttcttcaccatgacctgaagcctgataattttctaatgggcctgggccgcaaggcaaatcaggtgtacatcattgattttggcctcgcaaaaaagtatagggatcttcaaactcatagacacataccgtatagggaaaacaagaatcttacgggcacggctcgttacgctagtgtcaacacacatcttggagttgaacaaagtagacgggatgatttggaatcacttggttacgttcttatgtatttcctaagaggaagtcttccctggcagggacttagagcgggaaccaagaagcagaaatacgataggataagtgaaaagaagatgttgactccagtagaggtgttatgcaaatcatatccatcagagttcatgtcgtactttcactattgtcgatcgttgaaatttgaaagcaaaccagactattcatatttaaaaaggctttttcgagacttgttcattcgtgaaggctatcagttcgactatgtctttgattggaccatattaaagtatccacaaattggtgcaagctctagaacacggattcaaagtgtgaatgttggtcaaaacgttgggacatctgcagaaaaaccaggaagaacctcggctgtgcaagatgttcgtgaggccttccctagaagaaattcgccaggtggcagccgccttgaactttcaagaaacaggatttcagaaaatgtaccttcatcaaaagacgtgcaactcgattcagaaaaagtccgatcttctagaaacgggagttcgtcaaaacgtgcctcctttttaagcagcaacaaaccaacttcttcagcagatgcgacagatggcagatcaagccgactcacgtcaagtagtgggggccgcttatctactactcaaagaggatacgacaccaaaccattagcatctggtacttcaaaaggcggccgtgaagatcctcttaggagcttcgagttcctacaaatcaggaagtaa

SEQ ID NO: 223 - protein, 447 aa, Helianthus argophyllus
MDRVVGGKFKLGRKIGSGSLGELYLGVSIQTGEEVAVKLEPTKTKHPQLHYESKVYMLLQGGMGVPSLKWYGVEGDYNVMVIDLLGPSLEDLFNYCNRKFSLKTVLMLADQLINRVEYMHARSFLHHDLKPDNFLMGLGRKANQVYIIDFGLAKKYRDLQTHRHIPYRENKNLTGTARYASVNTHLGVEQSRRDDLESLGYVLMYFLRGSLPWQGLRAGTKKQKYDRISEKKMLTPVEVLCKSYPSEFMSYFHYCRSLKFESKPDYSYLKRLFRDLFIREGYQFDYVFDWTILKYPQIGASSRTRIQSVNVGQNVGTSAEKPGRTSAVQDVREAFPRRNSPGGSRLELSRNRISENVPSSKDVQLDSEKVRSSRNGSSSKRASFLSSNKPTSSADATDGRSSRLTSSSGGRLSTTQRGYDTKPLASGTSKGGREDPLRSFEFLQIRK

SEQ ID NO: 224 - DNA, 1422 bp, Hordeum vulgare
atggatcacatcgtcggcggcaagttcaagctcggcaagaagatcgggagcggatccttcggggagctcttcctcgccgtgaatgtgcagaccggagaggaggtcgccgtcaagctggaaaatgtcaagaccaagcacccgcagctccattacgagtccaagctctacatgcttctccaaggaggaactggcattccgcacctcaagtggtttggcgtggagggggagtataatgtgatggtgattgatcttcttggacccagccttgaggacctcttcaactactgcagtaggaagttctcgctcaagaccgtgctcatgctcgccgatcagatgattaaccgagttgagtacatgcatcaaaagggatttcttcaccgtgacataaaacctgataatttccttatggggctcggaaggaaagccaatcaggtatatataatcgattatggactggcaaagaaattcagagaccttcagactcataagcacatcccctacagggagaacaagaatctcactggaactgcacgctatgctagtgtcaatacccaccttggagttgagcaaagcaggagagatgatttagaatcacttggttatgtacttatgtacttcctcagaggcagcctgccatggcaggggctgaaagcgggcactaagaagcagaaatatgacaaaattagtgagaagaaaatgcttactcctgtggaggtactctgcaagtcttatccttcagaattcatttcttactttcactactgtcgatcattgcggtttgaagacaagccagattattcgtacctaaagagactgttccgtgatctcttcatcagggaaggataccaatttgattatgtatttgactggaccattttaaaatatccccagataggctccaatccacgaatgaggccaagtgaaagagtcagtggagctgctggaccttctatcgacaagatagagaaggccccaggcgaagcatctgctcgaaggaatcctagcgcttctctgaatcagagcgacaaccatgcaaccagaccacgggaaactgtatcgatgtcattaaaggagatcatgcacagcacagaccggtctggcgaaaggaccgtggagaggaccacggagagacctcgtacatcctcccgtacaggcagtgcgtcgaggagagcagttgcatcaagcagcaggcctgggtcatccatggaaccaagcgagcagcagtacagccggacgagcaggttgttctccagcagcaataacggcggcagccgcccgtccagcacccagagagtcaatcctggagtgggcgagtcaagggccacgtccctgtcgcgtgcggcggtcgcaagagggtcgcgcgacgagcccctccaccgcagcctcgagctcctgtccctcggcaccggtaagaggaaataa

SEQ ID NO: 225 - protein, 473 aa, Hordeum vulgare
MDHIVGGKFKLGKKIGSGSFGELFLAVNVQTGEEVAVKLENVKTKHPQLHYESKLYMLLQGGTGIPHLKWFGVEGEYNVMVIDLLGPSLEDLFNYCSRKFSLKTVLMLADQMINRVEYMHQKGFLHRDIKPDNFLMGLGRKANQVYIIDYGLAKKFRDLQTHKHIPYRENKNLTGTARYASVNTHLGVEQSRRDDLESLGYVLMYFLRGSLPWQGLKAGTKKQKYDKISEKKMLTPVEVLCKSYPSEFISYFHYCRSLRFEDKPDYSYLKRLFRDLFIREGYQFDYVFDWTILKYPQIGSNPRMRPSERVSGAAGPSIDKIEKAPGEASARRNPSASLNQSDNHATRPRETVSMSLKEIMHSTDRSGERTVERTTERPRTSSRTGSASRRAVASSSRPGSSMEPSEQQYSRTSRLFSSSNNGGSRPSSTQRVNPGVGESRATSLSRAAVARGSRDEPLHRSLELLSLGTGKRK

SEQ ID NO: 226 - DNA, 1377 bp, Lactuca sativa
atggatcatattgttggtggaaagtttaagcttggtcggaaaattggcagtggatcctttggtgaactttttttaggtgttaatattcaaactggcgaagaagtagctgttaaactggaatctgtcaagacaaggcatccacagcttcattatgaatcaaaaatatataggcttctccaaggaggaacgggagtaccaaacctgaaatggtttggtgttgagggggagtataacatcatggttattgaccttcttggaccaagtcttgaagaccttttcaactattgtaatagaaaattttccttgaaaactgtcctaatgcttgcagatcaactattaaatagagttgagtacatgcatgcaaggggtttccttcatcgtgacctaaagcctgacaattttcttatgggccttggtcgtaaagccaatcaggtgtacgcgattgattttggactcgcgaaaaaatatagggatcttcaaactcataaacacataccatacagggaaaacaagaatctcacgggtacagctcgttatgcaagtgtcaacacacaccttggagttgaacaaagtaggcgggatgatttggaatctcttggttacgttcttatgtattttataagaggaagccttccatggcaaggactgaaagcgggaaacaagaagcagaaatatgacaagattagtgaaaagaaaatgttgactccaattgaggtgctatgcaaatcatatccatcggagtttatatcatactttcactattgtcgatcattgagattcgaggataaaccagactattcatacctcaagaggcttttcagagacttatttattcgtgaaggctaccagtttgactatgtctttgattggacagtattgaagtatcctcaaatcagtgccagctccagagcacggcttccgggtaacacggggataaatgctggaacatctatggaaaagcagggaagaacgtcgggtggtcaagattcccgtgcactagatgcattcccaagaagaaatatagcaaccggcggccgctacgacttttcaagacaccggactcccgatgatatgacttcctcaaaggatgtgcaacctgattctgacaaattgcgatcttctcgaaacgggagctcgtcaaaatatgctgcagcctcaggcacaagaccaagttcatcgggcgaacaaacaccaactgaagggcaatcatcgagccgtatcatgtcaagtgctgggggacgcacgtctactactcaaagagcatcgtttggtttaggttatgatgccaagtcatcgggtttttctcgtccagctaaaggtggtcgtgaagatccgctcaggagctttgagttccttcaatcaggaagtgaaaggtaa

SEQ ID NO: 227 - protein, 458 aa, Lactuca sativa
MDHIVGGKFKLGRKIGSGSFGELFLGVNIQTGEEVAVKLESVKTRHPQLHYESKIYRLLQGGTGVPNLKWFGVEGEYNIMVIDLLGPSLEDLFNYCNRKFSLKTVLMLADQLLNRVEYMHARGFLHRDLKPDNFLMGLGRKANQVYAIDFGLAKKYRDLQTHKHIPYRENKNLTGTARYASVNTHLGVEQSRRDDLESLGYVLMYFIRGSLPWQGLKAGNKKQKYDKISEKKMLTPIEVLCKSYPSEFISYFHYCRSLRFEDKPDYSYLKRLFRDLFIREGYQFDYVFDWTVLKYPQISASSRARLPGNTGINAGTSMEKQGRTSGGQDSRALDAFPRRNIATGGRYDFSRHRTPDDMTSSKDVQPDSDKLRSSRNGSSSKYAAASGTRPSSSGEQTPTEGQSSSRIMSSAGGRTSTTQRASFGLGYDAKSSGFSRPAKGGREDPLRSFEFLQSGSER

SEQ ID NO: 228 - DNA, 1386 bp, Linum usitatissimum
atggagaagatgaaggttgaccatatcgtcggtggtaagtttaagcttgggaggaagattgggagtggatcttttggagagctctatctgggtgtaaatgtgcagactggagaagaagttgctgttaagctggaatctgtgaagaccaagcatcctcagcttcagtatgagtcaaagttgtatatgcttctccaaggagggactggaattcctcatctgaagtggtttggagttgaggtggagtataatatcatggttattgatcttcttggaccgagtttggaagatctattcaactactgtaataggaaatttactttgaaaacagtgctaatgcttgctgatcaactgattaatagggttgaatatatgcattcaagaggatttcttcaccgtgacataaagcctgataacttcttgatgggcctaggtcgcaaagccaatcaggtctatgtaattgattatggccttgcaaagaaatacagggatctccagactcacaagcacattccatacagagaaaataagaacctaacaggcactgctcgttatgcaagtgtcaacacccacctcggagttgagcaaagcagaagggatgatttggagtcacttggatatgtgcttatgtatttcctccgaggaagcctcccatggcaaggattaaaggctggcacaaaaaagcagaaatatgacaggatcagtgaaaagaaagtgcagacttcaatagagtctctttgtaaatcttatccatccgagtttgtatcctacttccactactgtcgctcattgcggttcgaagataaaccagattactcgtatttgaagaggcttttccgggacttatttattcgggaaggttatcaatttgactatgtgttcgactggactgtactgaagtatcctcaagttggttccagctctagagcacgagtaagtgtgaaaccaggtcctgcactcgcggcaggaccatctactgtaagagtgcccgagagagtttctgttggcaaagagatccgggagagattctcaggcgctgttgaggctttttcaatcaggagaatcactggtgctagcccgctcgacaattcgagagccaggacaaatgagactcaacagcagcctgaggcggagaaaggtcgcagcacgtctaggcatggaagtagctcgagacgagccatcgttccgaacggcaagccaagttcctcaggtgatcacggagatggtcgcctgacgagaacacaccattcttctggccatatctcttccacacaaagaatcctacctgcgtacgaacccatcaagtcatccggtgctcgagcagctgctgccaaatcccgcgaggaaaatctaaagagcttcgagttcctcaccctgaaccgacgatga

SEQ ID NO: 229 - protein, 461 aa, Linum usitatissimum
MEKMKVDHIVGGKFKLGRKIGSGSFGELYLGVNVQTGEEVAVKLESVKTKHPQLQYESKLYMLLQGGTGIPHLKWFGVEVEYNIMVIDLLGPSLEDLFNYCNRKFTLKTVLMLADQLINRVEYMHSRGFLHRDIKPDNFLMGLGRKANQVYVIDYGLAKKYRDLQTHKHIPYRENKNLTGTARYASVNTHLGVEQSRRDDLESLGYVLMYFLRGSLPWQGLKAGTKKQKYDRISEKKVQTSIESLCKSYPSEFVSYFHYCRSLRFEDKPDYSYLKRLFRDLFIREGYQFDYVFDWTVLKYPQVGSSSRARVSVKPGPALAAGPSTVRVPERVSVGKEIRERFSGAVEAFSIRRITGASPLDNSRARTNETQQQPEAEKGRSTSRHGSSSRRAIVPNGKPSSSGDHGDGRLTRTHHSSGHISSTQRILPAYEPIKSSGARAAAAKSREENLKSFEFLTLNRR

SEQ ID NO: 230 - DNA, 1362 bp, Malus domestica
atggagcatgtgattgctgggaagtttaagctggggaggaagattgggagtgggtctttcggagaactctatttaggtgtaaatgtacaaagtggggaggaggtggctgttaagctggaacctgtgaagaccaagcatccccagcttcattatgagtcaaaattgtatatgcttcttcaaggaggaactggaataccccacctcaagtggtttggagttgagggtgactacaacatcatggttattgaccttcttggacctagtttggaagatttgttcaactactgcaataggaagttcacattaaaaacagtgttgatgcttgcagatcaattgattaacagagttgaatacatgcactcaagaggttttcttcaccgtgatataaagccagacaactttttagtgggcctagcgcgtaaagccaatcaggtgtatgctattgattttggccttgcaaagaagtatagggatcttcagactcataagcacataccatacagggagaacaagaacctcacaggaactgctcgctatgcaagtgttaacacccaccttggaattgagcaaagcagaagagatgatttggaatctcttggttatgtgctgatgtatttcctaagaggaagccttccttggcaaggtttaaaagctggtacaaagaagcaaaagtacgacaaaatcagtgaaaagaaaatgtcaactcctatagaggtgctgtgcagatctcatccagctgaatttgtatcctactttcattactgccgatcattgcggtttgaagacaagccagattattcttatttaaagaggcttttcagggacttatttattcgagaaggttatcaatttgactatatctttgactggactgtgttgaagcaccctcagattggtggcagttctagaggatggcatgccagtgggaaagcgggtttaagcgcagggccatctatggaaagacctgaaagaggatcagttggaaaagagattcgagatagattctcgggtgcagttgaagcattttcaaggagaaacacctcaggttctagtccacgtcaggatcatttgaaacacaggtcttttgacgatgtaccttcacccagagatgcgcaccatgattctgaaaggggacgcaattcctctcggtatggcagcacttcaagaaaggctatggctagcagtaagccaagctcctcaggtgatcacactcccagtgacggtcgcacaagcagattagtctcaagcagtagccgcccatctactgggaacagaggtttcgaacccaagcgctctgcagctgcaagaggcagccgagatgatcctctccggagctttgagctcctttcaatcaggaagtaa

SEQ ID NO: 231 - protein, 453 aa, Malus domestica
MEHVIAGKFKLGRKIGSGSFGELYLGVNVQSGEEVAVKLEPVKTKHPQLHYESKLYMLLQGGTGIPHLKWFGVEGDYNIMVIDLLGPSLEDLFNYCNRKFTLKTVLMLADQLINRVEYMHSRGFLHRDIKPDNFLVGLARKANQVYAIDFGLAKKYRDLQTHKHIPYRENKNLTGTARYASVNTHLGIEQSRRDDLESLGYVLMYFLRGSLPWQGLKAGTKKQKYDKISEKKMSTPIEVLCRSHPAEFVSYFHYCRSLRFEDKPDYSYLKRLFRDLFIREGYQFDYIFDWTVLKHPQIGGSSRGWHASGKAGLSAGPSMERPERGSVGKEIRDRFSGAVEAFSRRNTSGSSPRQDHLKHRSFDDVPSPRDAHHDSERGRNSSRYGSTSRKAMASSKPSSSGDHTPSDGRTSRLVSSSSRPSTGNRGFEPKRSAAARGSRDDPLRSFELLSIRK

SEQ ID NO: 232 - DNA, 1392 bp, Medicago truncatula
atggatcatgttattggtggaaaattcaagcttggaaggaaaatcggtggtgggtcatttggagagctttacttgggtgttaatatacaaactggagaggaagttgctcttaaattggaacctgcaaagaccaaacatcctcaacttcactatgagtcaaaattgtacatgcttcttcaagggggaacgggtattccccatttaaaatggtttggagttgagggtgactacaatgccatggcaattgacctccttggaccaagtctggaagacttgtttaactattgcaataggaaattctctctaaaaacagttctgatgcttgcagatcagctactaaacagagttgagtacatgcactcccggggtttccttcaccgtgatataaagcctgacaactttttaatgggtttaggccgcaaagcaaatcaggtatacataattgattatggccttgcgaaaaagttccgagatcttcacacacacaagcatataccatatagggaaaacaaaaacctcactggaactgcccggtatgcgagtgttaatactcatctaggagttgaacaaagcagaagagatgatctggaatcgcttggttttgtcctcatgtactttttgagaggaagtctcccttggcaaggtttgaaagctggcaataaaaaacaaaaatacgacaagataagtgaaaagaagatgcttactcctgtagaggttttgtgcaagtcacatccgttggaatttacatcatacttccattactgccgatcgttgcggtttgaagataagcctgattattcatatctcaagagactctttcgtgacctattcatccgagaaggctatcagtttgattatgtgttcgattggactatattgaagtatccacaaattggatctagttccagagcccggccaagtgggaaaccagtcataaatccaggacaatcaggagagagagtagaacggccttcaggtggaccagagattcgggatagattctcgggtgcagttcaggcatttgcaagaaggaatggatctggccatggtgtgcatggtgatcattccaggcatagatcttcagatgagccatcttctaaagacgtgcaagctgattctgagaggccacgtagctcttctcgtcatggcagttcctccaaaagacctgtcttatcaagcagccgtccaaactcttctggtgaaccgagtgaaagccgctctagccgattgctcttaagcagtagcagactatctactactcagaggactcaaccaggtcttgagtccaaatcatcatcatttaataatcgtgcttctggggcaagaggtggtcgtgatgataccctcaggagctttgaactcctgtcacttggcacaggaaaaaggaaatga

SEQ ID NO: 233 - protein, 463 aa, Medicago truncatula
MDHVIGGKFKLGRKIGGGSFGELYLGVNIQTGEEVALKLEPAKTKHPQLHYESKLYMLLQGGTGIPHLKWFGVEGDYNAMAIDLLGPSLEDLFNYCNRKFSLKTVLMLADQLLNRVEYMHSRGFLHRDIKPDNFLMGLGRKANQVYIIDYGLAKKFRDLHTHKHIPYRENKNLTGTARYASVNTHLGVEQSRRDDLESLGFVLMYFLRGSLPWQGLKAGNKKQKYDKISEKKMLTPVEVLCKSHPLEFTSYFHYCRSLRFEDKPDYSYLKRLFRDLFIREGYQFDYVFDWTILKYPQIGSSSRARPSGKPVINPGQSGERVERPSGGPEIRDRFSGAVQAFARRNGSGHGVHGDHSRHRSSDEPSSKDVQADSERPRSSSRHGSSSKRPVLSSSRPNSSGEPSESRSSRLLLSSSRLSTTQRTQPGLESKSSSFNNRASGARGGRDDTLRSFELLSLGTGKRK

SEQ ID NO: 234 - DNA, 1392 bp, Oryza sativa
atggagcatgtgatcggggggaagtttaagctggggaggaagattgggagcggatcttttggggagctataccttggtgtgaatatacagagcagcgaggaggtagccatcaagttggaatctgtaaaatcaaggcatcctcagcttcattatgagtcaaaactatacatgcttctgcaggggggaactggaattcctcatctgaagtggtttggagtggagggggagtacaatgtcatggttatcgatcttcttggtccaagtttagaggacttattcaactactgcaacagaaagttttctcttaaaacagtacttatgcttgctgatcagatgatcaacagggtagagtacatgcacactagggggtttctacatcgtgatatcaagccagacaacttccttatgggtttaggccgcaaagcaagccaggtttatgtcatcgactatggtcttgcaaagaaataccgggacctccaaactcataagcatataccttacagggagaacaaaaatctcacaggaacagcacgctatgctagtgtaaacacccatcttggagtagaacaaagcaggagagatgatttagagtctctgggctatgtgcttatgtatttcttaagaggaagccttccttggcaaggtctaaaagctggcacaaaaaaacagaaatatgacaaaattagtgaaaagaaaatgcttactccagttgaggttctctgtaaatcttatcccacagagttcatttcatacttccattactgtcgatctttgcgatttgaagataaaccagactacagctatttgaagagacttttccgagatctattcatccgtgaagggtaccagcttgattatatatttgattggacgaagcaaggttcagaaagtaacagattgcgatcaagtggaaggacaagtgggttggtgggaccatctgcagaacggactgaacgagctgcagcaagacaggatgttcctgacagattctctggtacagtcgatccatttgctagaagaactggctctggttctggccattacggagagcacacaaagcacagaaatatattggattcattacttgcacccaagacggctgttgatttagataaaagaaggcccacatcatcatctcgtaatgggagcacatcaaggaaggctctcttgtcaagcagcagaccaagttctggagatcccattgatccgaaccgcagtaacctaattccaaccagcagtggcagcagtcgcccatcaactatgcagaggcttcaccagtcaacaggacttgagaccaggtcctcgcttaccaaaactgcaagaaatgtccatgatgatcccactttgaggacctttgaacgcctttcaatcagtgctgacagaaggaaataa

SEQ ID NO: 235 - protein, 463 aa, Oryza sativa
MEHVIGGKFKLGRKIGSGSFGELYLGVNIQSSEEVAIKLESVKSRHPQLHYESKLYMLLQGGTGIPHLKWFGVEGEYNVMVIDLLGPSLEDLFNYCNRKFSLKTVLMLADQMINRVEYMHTRGFLHRDIKPDNFLMGLGRKASQVYVIDYGLAKKYRDLQTHKHIPYRENKNLTGTARYASVNTHLGVEQSRRDDLESLGYVLMYFLRGSLPWQGLKAGTKKQKYDKISEKKMLTPVEVLCKSYPTEFISYFHYCRSLRFEDKPDYSYLKRLFRDLFIREGYQLDYIFDWTKQGSESNRLRSSGRTSGLVGPSAERTERAAARQDVPDRFSGTVDPFARRTGSGSGHYGEHTKHRNILDSLLAPKTAVDLDKRRPTSSSRNGSTSRKALLSSSRPSSGDPIDPNRSNLIPTSSGSSRPSTMQRLHQSTGLETRSSLTKTARNVHDDPTLRTFERLSISADRRK

SEQ ID NO: 236 - DNA, 1389 bp, Oryza sativa
atggatcatgtagtcgggggcaagttcaagcttggaaagaagatcgggagtggatccttcggggagctcttccttgctgttaatgtgcagactggagaggaagtcgccgtcaaattggaaaatgttaagacgaagcacccacagcttcattatgagtcgaagctgtacatgcttctgcagggaggaactggtattccgcacttgaagtggtttggcgtggagggagagtacaatgtgatggtgatcgatcttcttgggccaagccttgaggacctattcaactattgcagtaggaaattctcgttaaagactgtcctcatgcttgctgatcagatgatcaatcgagttgagtacatgcatcagaagggatttcttcaccgtgatatcaagcctgataatttccttatggggcttggtaggaaagccaatcaggtatatataatagattatgggcttgcgaagaaatatagggaccttcagactcacaagcacatcccatacagagagaacaagaacctcactggaacagctcggtatgcaagtgtcaatacccatcttggtgttgagcaaagcagaagagatgatctagaatctcttggttatgtccttatgtacttccttagaggcagcctaccatggcaggggctgaaagcaggcactaagaagcagaagtacgacaaaataagtgagaaaaagatgcttactcctgtggaggttctttgcaaatcttacccatcagaattcatttcttacttccactactgccgttcattgaggtttgaagacaagccagattattcttacttaaagaggctattccgtgatctctttatccgggagggatatcaatttgattatgtatttgactggaccattttgaaatatccccagataggctccaaaccactgatgaggccaagtgaaagaaccagtggagctgcgggaccttctatggagaagatggaaaaggccccaggtgaagcatctggcagaaggaatcctactggttctttgaatcagagtgacaattatgcacaacggccgtcaatgtcactaaaggaaatcatgcatagcaccgaccggtccggcgaaaggaccgtggaaagaccccgtacatcctcccgtacaggcagtgcatcaaggagagcggttgcgtcaagcagcaggccaggttcatcggtggaaccaatggagcagcaatacagccggacaagcaggttgttctcaagcagtggaagccgtccttccagcacgcagagggttaatccatcggttggagagacaagggccacttctctctcacgagcagccgttgcaagagggtcccgcgacgagcctctccaccgcagcctggagctgctgtcccttggtggcggtaagaggaaataa

SEQ ID NO: 237 - protein, 462 aa, Oryza sativa
MDHVVGGKFKLGKKIGSGSFGELFLAVNVQTGEEVAVKLENVKTKHPQLHYESKLYMLLQGGTGIPHLKWFGVEGEYNVMVIDLLGPSLEDLFNYCSRKFSLKTVLMLADQMINRVEYMHQKGFLHRDIKPDNFLMGLGRKANQVYIIDYGLAKKYRDLQTHKHIPYRENKNLTGTARYASVNTHLGVEQSRRDDLESLGYVLMYFLRGSLPWQGLKAGTKKQKYDKISEKKMLTPVEVLCKSYPSEFISYFHYCRSLRFEDKPDYSYLKRLFRDLFIREGYQFDYVFDWTILKYPQIGSKPLMRPSERTSGAAGPSMEKMEKAPGEASGRRNPTGSLNQSDNYAQRPSMSLKEIMHSTDRSGERTVERPRTSSRTGSASRRAVASSSRPGSSVEPMEQQYSRTSRLFSSSGSRPSSTQRVNPSVGETRATSLSRAAVARGSRDEPLHRSLELLSLGGGKRK

SEQ ID NO: 238 - DNA, 1365 bp, Oryza sativa
atggagcgcgttattgggggcaagtttaagctcgggaagaagatcgggagtggatccttcggggagctctatctcgccgtgaacatacagaatagcgaagaggtggccgtcaaactggagtctgtgaaatcaaggcatcctcagctacactatgaatcaaaactatatatgcttttgcaaggaggaactgggattccacatcttaagtggtttggggttgagggggagtacaatgtaatggtgatcgatcttcttggcccaagtcttgaggacctatttaactactgcaacagaaagctctctcttaaatcagtgcttatgcttgctgatcagatgattgctagagtagagtacatgcacacgagaggattccttcatcgtgatattaagccagacaatttccttatgggtttgggtcgtaaagcaaatcaggtttatgtcatcgattatgggcttgcgaaaaagtaccgagatctccaaacacataagcacataccttatagggaaaacaaaaatctaactggaactgcacgatatgctagtgttaatacacatcttggagttgaacaaagcaggagagatgatttggaatctctcggttatgtactgatgtacttcttaagaggaagtcttccttggcaaggtctgaaagctggtacaaagaagcaaaagtatgatagaatcagtgaaaagaagatgctgaccccagttgaggtcctctgtaaatcttatccatcagaatttgtttcatacttccattattgccgatcactacggtttgaagataagccagactattcctatttgaagaagctcttccgagacttatttatccgtgaagggtaccaacttgattatgtatttgactggaccatgttgaagtatcctcaaattagagataacaaactacgacctagtgggaagacaagtgggttggtgggtcgttctgcagaacggactgaaagaactacaggtgaagctcttgctagaagaactggctctggttctggccgaaatggagaacccactaagcacagaactctactggactcactgatgtcatctaaggctaccgctgatacagataaaacaaggccgacatcactgtcgcggaacgggagcacgtcaagacgggctgttgtttcgtcgagcaaaccgaattgtggagatcccagtgacaccaatcgcacaagccgcctattctcaagtagcagcagccggccatccgctgcccaaagggcgcttcagtcggccggagctgagctgaggtcctcgtcgttgtccaagacgcgtaagagctcacgtgatgatcccaccatacggagcttcgagatgctctcactcagcgctgacaggaggaaataa

SEQ ID NO: 239 - protein, 454 aa, Oryza sativa
MERVIGGKFKLGKKIGSGSFGELYLAVNIQNSEEVAVKLESVKSRHPQLHYESKLYMLLQGGTGIPHLKWFGVEGEYNVMVIDLLGPSLEDLFNYCNRKLSLKSVLMLADQMIARVEYMHTRGFLHRDIKPDNFLMGLGRKANQVYVIDYGLAKKYRDLQTHKHIPYRENKNLTGTARYASVNTHLGVEQSRRDDLESLGYVLMYFLRGSLPWQGLKAGTKKQKYDRISEKKMLTPVEVLCKSYPSEFVSYFHYCRSLRFEDKPDYSYLKKLFRDLFIREGYQLDYVFDWTMLKYPQIRDNKLRPSGKTSGLVGRSAERTERTTGEALARRTGSGSGRNGEPTKHRTLLDSLMSSKATADTDKTRPTSLSRNGSTSRRAVVSSSKPNCGDPSDTNRTSRLFSSSSSRPSAAQRALQSAGAELRSSSLSKTRKSSRDDPTIRSFEMLSLSADRRK

SEQ ID NO: 240 - DNA, 1428 bp, Oryza sativa
atggagcaagtggtcggagggaagtataagctcgggaggaagattgggagtgggtcatttggggagctatatctcggtgttaatatacataatggggaggaagtgggaataaagctggaatctgtgagatcaaaacatccacagctgcattacgaatccaaagtttatatgcaaatgcaaggcggaaatggtatcccacatatgaagtggtacggtgtcgctggggagcacaatgttatggtgattgatcttcttggcccaagtttggaggacttgttcaacagctgcaacaggaaattctctctcaaaaccgtccttatgcttgctgatcaaataataaaccgagtggaatacatgcattccaagggatttattcaccgtgatatcaagccagacaatttccttatcggcttaggccggaaagcgaaccaggtgtacataattgattatgggcttgctaagaaatacaaggatctccagacccataaacacattccctacagggagaacaagaatctgacaggaacggcacgttatgctagtgtgaatactcatcttggaatagagcaaagcaggagagatgatctggagtctgttggctatcttctcctatattttttaagaggaagtcttccatggcagggtcttaaagctggtacaaagaaacaaaaatatgacagaatcagtgaaaagaaaatgctcaccccagcagaggttctgtgcaaatcttatccatcagagttcacctcatatttccactactgtcgttccctgcgattcgaagataaaccagattactcttatttgaagaaactctttcgggatgtatttactcgtgaaggataccaacttgattacatatttgactggactacaagcaaaaatcctcagatgggttctaccaataagcttattcaacaacaaagtggaagaatgattggaattggaccctctgttgaccgaccagacaaaacttcagtgggacaagagatccgggatagatttaccggtgctgttgaggccttcgccagaagaaacccgggttccggtcgcctcggagacaattccaggcacaaaagcctcgcggattcctttggttcatctacagaagctgttgttgattcggagagaacacgaaccatatccaggaacaggagctcggcgaagatgcccaccgccgccgccgccgccaccccgtctagccgggggacatcctcgaaaggcgacggcggcgagcagaaccgggccggccggtgggtgtcgagcggcagcggcagcaaccgcccgtcccccgccgccgcccagcggcaccaccaccaccaccaccactcggccgccgcggacgacaggtcgccgccggcagcgaaggggggcaccgctatccggtgcttcgagcgcctctcgatcggcggcgagaggaggaagtga

SEQ ID NO: 241 - protein, 475 aa, Oryza sativa
MEQVVGGKYKLGRKIGSGSFGELYLGVNIHNGEEVGIKLESVRSKHPQLHYESKVYMQMQGGNGIPHMKWYGVAGEHNVMVIDLLGPSLEDLFNSCNRKFSLKTVLMLADQIINRVEYMHSKGFIHRDIKPDNFLIGLGRKANQVYIIDYGLAKKYKDLQTHKHIPYRENKNLTGTARYASVNTHLGIEQSRRDDLESVGYLLLYFLRGSLPWQGLKAGTKKQKYDRISEKKMLTPAEVLCKSYPSEFTSYFHYCRSLRFEDKPDYSYLKKLFRDVFTREGYQLDYIFDWTTSKNPQMGSTNKLIQQQSGRMIGIGPSVDRPDKTSVGQEIRDRFTGAVEAFARRNPGSGRLGDNSRHKSLADSFGSSTEAVVDSERTRTISRNRSSAKMPTAAAAATPSSRGTSSKGDGGEQNRAGRWVSSGSGSNRPSPAAAQRHHHHHHHSAAADDRSPPAAKGGTAIRCFERLSIGGERRK

SEQ ID NO: 242 - DNA, 1389 bp, Populus trichocarpa
atggatcatgtgattggtggcaagtttaggcttggccggaagatcggtagtggatcctttggtgaactttatttaggtattaatgtacagagtggagaggaagtggctgttaagttggaatctgtgaaaaccaagcaccctcagcttcattatgaatcaaaactatacatgctacttcaaggaggaactggtattcctcatctcaaatggtttggagttgagggtgaatacaatgtcatggttattgaccttcttggaccaagcctcgaagacttgtttaattattgcaatcgaaagttatctttgaaaacggtgctgatgcttgcagatcaattaataaatagagttgaatacatgcactcaaggggttttcttcaccgtgacatcaagcctgacaactttttgatgggtttagggcgcaaagcaaatcaggtctacatcattgactatggccttggaaaaaagtatagggatctgcaaacacacaagcatataccatatagggaaaacaagaatctcacaggcacggctcgctatgctagtgttaatacccatcttggagttgagcaaagcagaagagatgatctggaatctcttggttacgtgcttatgtattttttgaggggaagccttccatggcagggcttgaaagctggcactaaaaaacagaaatatgacaggatcagtgaaaagaagatgcttactcccatagaggtcctttgcaaaaactatccttcagaatttacatcttactttcattattgccgttcactgcgattcgaagacaaaccagattattcatacctgaagagactattccgtgacttgtttattcgagaaggctatcagtttgattatgtatttgactggactatattgaagtacccgcagattggctccagttctagatcacgactaagtggaaaaccagctgtaaacccaggaccatccgcagaaagagtagaatggccttcaggccaggaaatccgggacagattctctggtgcagttgaagcatttgctcgaaagaatagcactggacatgctatgcacagagatcggtccaggcacaggtcctcagatgatgtgccatcatcaaaggatgtgcatcctgattcagaaaggccccggtcatcttctcgaaatggcagcacttcaaagagggctgtaatttcaagcagccggccaagctcttctggtgagcctagtgagaatcggtcaagccggctggcctcgagcagtggtcgcctgtcaacaacccagaggattcaacctgggcttgagtcaaaatcatcttcctttactcgtgctctagccacaagaggtggtcgtgatgatacactcaggagctttgaactcctgtctattggaagaggaaagaggaaataa

SEQ ID NO: 243 - protein, 462 aa, Populus trichocarpa
MDHVIGGKFRLGRKIGSGSFGELYLGINVQSGEEVAVKLESVKTKHPQLHYESKLYMLLQGGTGIPHLKWFGVEGEYNVMVIDLLGPSLEDLFNYCNRKLSLKTVLMLADQLINRVEYMHSRGFLHRDIKPDNFLMGLGRKANQVYIIDYGLGKKYRDLQTHKHIPYRENKNLTGTARYASVNTHLGVEQSRRDDLESLGYVLMYFLRGSLPWQGLKAGTKKQKYDRISEKKMLTPIEVLCKNYPSEFTSYFHYCRSLRFEDKPDYSYLKRLFRDLFIREGYQFDYVFDWTILKYPQIGSSSRSRLSGKPAVNPGPSAERVEWPSGQEIRDRFSGAVEAFARKNSTGHAMHRDRSRHRSSDDVPSSKDVHPDSERPRSSSRNGSTSKRAVISSSRPSSSGEPSENRSSRLASSSGRLSTTQRIQPGLESKSSSFTRALATRGGRDDTLRSFELLSIGRGKRK

SEQ ID NO: 244 - DNA, 1392 bp, Populus trichocarpa
atggatcatgtgattggtggcaagtttaagcttgggcggaagatcggtagtgggtcctttggtgaactttatttaggtattaatgtacagagtggagaggaagtggctgttaagttggaatctgtgaaaaccaagcacccccagcttcattatgaatcaaaactatacatgctacttcaaggaggaacgggtattcctcatctcaaatggtttggtgttgaggttgattacaatgccatggttattgaccttcttggaccaagtcttgaagacttgtttaattattgcaatcggaagttatctttgaaaacagtgttgatgcttgcagatcaattaataaatagagttgaatatatgcactcacggggttttcttcaccgtgacatcaagcctgacaactttttgatgggtttagggcgcaaagcaaatcaggtctacattattgactatggccttgcaaaaaagtacagagatctgcaaacacacaagcatataccatatagggaaaacaagaatctcacaggcacggctcgctatgctagtgttaatactcatcttggagttgagcaaagcagaagagatgatctggaatcccttggttatgtgcttatgtattttttgaggggaagccttccatggcagggcatgaaagctggtaataaaaagcagaaatatgacaagatcagtgaaaagaagatgcttgttcctatagaggtcctttgcaagaactatccttcagaatttacatcttactttcattattgccgttcactgcggtttgaagacaaacctgattattcatacctgaagagacttttccgcgacttgtttattcgagaagggtatcagtttgattatgtttttgactggaccatattgaagtacccgcagattggttcaagttctagatcacgaccaagtggcaaaccagctgtatacccagggccatctgctgaaagagtggaacggccatcagtaggccaggaagtccgagacagattctctggtggagttgaggcatttgctcgaaggaatagctctggacatgctttgcacagcgatcagtccaggcacaggtcctcagatgatgcgccatcatccaaggatgtgcatcccgattcagaaaggccccgttcgtcatctcgaaatggaagcacttcaaagagggcggtcatgtcaagcagccggccaagctcttctggcgagcctagtgagaatcggtcaagccggctggtctcaagcagtggtcgcctgtcaacaacccaaagggttcaacctgggtttgagtcaaaatcatcttcttttactcgtgcttcagccacaagtggtggtcgtgtcaatacacttaggagctttgaactcctgtctattggcacaggaaagaggaaataa

SEQ ID NO: 245 - protein, 463 aa, Populus trichocarpa
MDHVIGGKFKLGRKIGSGSFGELYLGINVQSGEEVAVKLESVKTKHPQLHYESKLYMLLQGGTGIPHLKWFGVEVDYNAMVIDLLGPSLEDLFNYCNRKLSLKTVLMLADQLINRVEYMHSRGFLHRDIKPDNFLMGLGRKANQVYIIDYGLAKKYRDLQTHKHIPYRENKNLTGTARYASVNTHLGVEQSRRDDLESLGYVLMYFLRGSLPWQGMKAGNKKQKYDKISEKKMLVPIEVLCKNYPSEFTSYFHYCRSLRFEDKPDYSYLKRLFRDLFIREGYQFDYVFDWTILKYPQIGSSSRSRPSGKPAVYPGPSAERVERPSVGQEVRDRFSGGVEAFARRNSSGHALHSDQSRHRSSDDAPSSKDVHPDSERPRSSSRNGSTSKRAVMSSSRPSSSGEPSENRSSRLVSSSGRLSTTQRVQPGFESKSSSFTRASATSGGRVNTLRSFELLSIGTGKRK

SEQ ID NO: 246 - DNA, 1371 bp, Populus trichocarpa
atggaaaaaacaaagattgaccatatggttggtggcaagtttaagcttggcaggaagattggcagtggatcttttggagagctatttctgggtgtaaatgtgcaaactggagaggaagttgctgttaaactggaatctgtaaagaccaagcatccacagcttcattatgagtcaaagttgtatatgcttcttcaaggagggactggaattccccatctcaagtggtttggagttgaggccgagtacaatgtcatggtcattgaccttcttgggccaagtttggaagacttattcaactactgcaacaggaaattcacattgaaaacagtactgatgcttgcagatcaattaattaacagagttgaatatatgcattcaagaggtttcctgcaccgtgatataaagcctgacaactttttgatgggcctcggccgcaaagcaaatcaggtatatgccatcgattttggtcttgcaaagaagtatagagatcttcagactcacaagcacattccatacagggagaacaagaaccttacaggcaccgcacggtatgcaagtgtcaatactcacctcggagttgaacaaagcagacgggatgatttggaatctcttggttatgtgcttatgtatttcttaaggggcagtcttccctggcaaggattaaaggctggcacaaagaagcaaaaatatgataagatcagcgagaagaaagtttcaactcctattgaggtgctttgtaagtcgtacccctctgaatttgtatcatacttccactactgccgatcactgcggtttgaagacaaaccagactattcatatttgaagaggctgtttcgtgatttatttattcgagaaggttatcagtttgactatgtctttgactggactgttttgaagtaccctcagattggtgccagctctagaggacggcattctagcgggaaaccaggtcatgctggaccatccgctgaaagaccagcagaaagggtctcggttggaaaagagattcgggaaagattctcaggtgcagttgaagcattttccactaaaagagtctctggctctagtcaacatgataattccagaaacaagggcttggataatccacccgagccagaaaaagggcgcaattcttctcgttatggcagcaactcaagaaaagctgttatctcaaatggcagaccaagttcatctggagaacctagtgaaggtcgctctggcagattactctcaagtggtggccgtctgacttcagctcaaagaattcaaccaggttatgagctcaaatcatcccagacacgtcctgcagctgctagaggcactcatgaggacactttccggagctttgagttcctctcaatcaggaagtga

SEQ ID NO: 247 - protein, 456 aa, Populus trichocarpa
MEKTKIDHMVGGKFKLGRKIGSGSFGELFLGVNVQTGEEVAVKLESVKTKHPQLHYESKLYMLLQGGTGIPHLKWFGVEAEYNVMVIDLLGPSLEDLFNYCNRKFTLKTVLMLADQLINRVEYMHSRGFLHRDIKPDNFLMGLGRKANQVYAIDFGLAKKYRDLQTHKHIPYRENKNLTGTARYASVNTHLGVEQSRRDDLESLGYVLMYFLRGSLPWQGLKAGTKKQKYDKISEKKVSTPIEVLCKSYPSEFVSYFHYCRSLRFEDKPDYSYLKRLFRDLFIREGYQFDYVFDWTVLKYPQIGASSRGRHSSGKPGHAGPSAERPAERVSVGKEIRERFSGAVEAFSTKRVSGSSQHDNSRNKGLDNPPEPEKGRNSSRYGSNSRKAVISNGRPSSSGEPSEGRSGRLLSSGGRLTSAQRIQPGYELKSSQTRPAAARGTHEDTFRSFEFLSIRK

SEQ ID NO: 248 - DNA, 1371 bp, Populus trichocarpa
atggaaaaatcgaagattgaccatatggttggtggcaagtttaagcttgggaggaagattggcagtggatcttttggagaactctttctgggtgtaaatgtgcaaactggagaggaagttgctgttaaactggaatctgtaaagaccaagcatccacagcttcattatgagtcaaagttgtatatgcttcttcaaggagggactggaattccccatctcaagtggttcggagttgaggttgattacaatgtcatggtcattgaccttcttgggccaagtttggaagatttattcaactactgcaacaggaaattcacattgaaaacagtgctgatgcttgcagatcaactaattaacagagttgaatacatgcattcaagaggtttccttcaccgtgatataaagcctgacaactttttgatgggcctaggccgcaaagcaaatcaggtttatgtcattgattttggtcttgcaaagaagtatagagatcttcagacccacaagcacattccatacagggagaacaagaaccttacaggcacagctcgctatgcaagtgttaacactcaccttggagttgaacaaagcagacgggatgatttggaatcccttggttatgtgctaatgtatttcttaaggggcagtcttccatggcaaggattaaaggctggcacaaagaagcaaaaatatgataagatcagcgaaaagaaagtttcaacccctattgagatgctttgtaagtcacacccctctgaatttgtatcatacttccactactgccggtcactgcgatttgaagacaaaccagactattcatatttgaagaggctgtttcgtgacttatttattcgagaaggttatcagtttgactatgtttttgactggactgttttgaagtaccctcagattggtgccagctctagaggacggtattctagtgggaaacctggtcatgctggaccatccgcagaaagaccagccgaaagggtctcagttggaaaagagattcgggaaagattctcaggtgcagttgaagcattttcaacaaaaagggtcactggttctagtctacatgatacttccagaaacaagaccttggataatccacctgagccagaaaaagggcgcagttcttctcgatatggaagcacctcaagaaaagccattatctcaaatagcaggccaagttcctctggagaaccttccgaaggtcgctcgggccgattactctctagtggtggccgtctgccttcgactcaaagagtgcaaccagggtatgagatcaaatcatcccagacccgtgccgcagctgttagaggcactcgtgaggacactttccggagctttgagttcctctcgctcaggaagtga

SEQ ID NO: 249 - protein, 456 aa, Populus trichocarpa
MEKSKIDHMVGGKFKLGRKIGSGSFGELFLGVNVQTGEEVAVKLESVKTKHPQLHYESKLYMLLQGGTGIPHLKWFGVEVDYNVMVIDLLGPSLEDLFNYCNRKFTLKTVLMLADQLINRVEYMHSRGFLHRDIKPDNFLMGLGRKANQVYVIDFGLAKKYRDLQTHKHIPYRENKNLTGTARYASVNTHLGVEQSRRDDLESLGYVLMYFLRGSLPWQGLKAGTKKQKYDKISEKKVSTPIEMLCKSHPSEFVSYFHYCRSLRFEDKPDYSYLKRLFRDLFIREGYQFDYVFDWTVLKYPQIGASSRGRYSSGKPGHAGPSAERPAERVSVGKEIRERFSGAVEAFSTKRVTGSSLHDTSRNKTLDNPPEPEKGRSSSRYGSTSRKAIISNSRPSSSGEPSEGRSGRLLSSGGRLPSTQRVQPGYEIKSSQTRAAAVRGTREDTFRSFEFLSLRK

SEQ ID NO: 250 - DNA, 1395 bp, Populus trichocarpa
atggatcatattgttgggggaaaattcaaactgggtagaaagatcggtggaggatcttttggggagatttttcttgggattgatgtgcagaatggagaggaagttggcataaagctggaacctgtaaggagcaagcaccctcagcttcactatgagtctaaaatttacatgcttcttcaaggaggaatgggaattcctcaactcaagtggtttggtgttgatggtgagtacagcatcatggttattgaccttcttgggccaagtcttgaagacttattcaactactgcaatcggaagctttctttgaaaacagtgttgatgcttgcagatcaattgattaacagggttgaatatatgcactcaaggggctttcttcaccgtgacataaagcctgataactttcttatgggtttgggacgtaaagccaatcaggtttatattattgattatggccttgcaaagaagtatagggattctcaaactcataagcacataccatacagggaaaataaaaatcttaccggcacagctcgatatgccagtgttaacactcaccttggagttgaacaaagtagaagagatgatttggaatctctcggttatgtgcttatgtatttcctcaggggaagccttccgtggcagggtcttaaagcagggacaaaaaagcagaagtatgataaaatcagtgaaaagaagaccttaactcctatagaggttctttgcaaatcatatccatcagagttcatatcatactttcattattgtcgatcattacgatttgaagacaaaccggattattcatatttgaagaggctttttcgtgacttatttcttagagaaggctatcaatttgattatatatatgattggacaattttgaagtatcctcaaattggttccaattctagacaaaagcagcctagtgcaaaggcaggttcaaaacttcgaccatctactgaaaaaacagaaaagactccagtgggaaaagagatgcatgatagatatttgggtgtggttgaagtgttgggtagaagaagtgcttccaatgttaatgttgatcgctcgaagcacaggccatcggagaatgtttcaccatcaaaggaagtgcgatctgatttggatagaggccgcacttctttctctcacaatggaagtatgtcaagaaaggctgttgcttcaagcagcagaataggcactactgtttcagctaatgagagtagatcaagttggctgttttcgaatactaatcgcctgcctaccacccaaaaaaaccgttctggagttgagtccaaaatggcatcagtttctcatggaacccctacaaaaggcacccgtgagggccatcttcgaagctttgagaatctttccattggcgcacagaagaggaagcaatga

SEQ ID NO: 251 - protein, 464 aa, Populus trichocarpa
MDHIVGGKFKLGRKIGGGSFGEIFLGIDVQNGEEVGIKLEPVRSKHPQLHYESKIYMLLQGGMGIPQLKWFGVDGEYSIMVIDLLGPSLEDLFNYCNRKLSLKTVLMLADQLINRVEYMHSRGFLHRDIKPDNFLMGLGRKANQVYIIDYGLAKKYRDSQTHKHIPYRENKNLTGTARYASVNTHLGVEQSRRDDLESLGYVLMYFLRGSLPWQGLKAGTKKQKYDKISEKKTLTPIEVLCKSYPSEFISYFHYCRSLRFEDKPDYSYLKRLFRDLFLREGYQFDYIYDWTILKYPQIGSNSRQKQPSAKAGSKLRPSTEKTEKTPVGKEMHDRYLGVVEVLGRRSASNVNVDRSKHRPSENVSPSKEVRSDLDRGRTSFSHNGSMSRKAVASSSRIGTTVSANESRSSWLFSNTNRLPTTQKNRSGVESKMASVSHGTPTKGTREGHLRSFENLSIGAQKRKQ

SEQ ID NO: 252 - DNA, 1440 bp, Sorghum bicolor
atggagcatgtgattggagggaagtataagcttgggaggaagattgggagcggatccttcggggagctatatctcggtgttaatatacagaatggagaggaagtaggaataaagttggagcctgtgaaaacaaaacatccacagctgcactatgaatctaaagtttatatgctactgcagggtggaaacggtatcccacacctcaagtggtatggtgtcgaaggggagtacaatgttatggtgattgatcttcttggcccaagtttggaagatttgtttaattgctgcaacaggaaattttctatgaaaacagtgcttatgcttgctgatcaactgataaaccgagtggaatacatgcattccaagggatttattcaccgtgacatcaagccagacaacttccttatgggcttaggtcggaaagctaatcaggtctatatcattgattatggccttgctaagaaatacaaggaccttcagactcataaacacatcccatacagagagaacaaaaatctgactggaacagcacgctatgctagtgtgaatactcatcttggaatagaacaaagcaggagagatgatctggagtctgttggctatcttctgctatattttttaagaggaagcctcccatggcagggtcttaaagctggcactaagaaacaaaagtatgacaaaattagtgaaaagaaaatgcttacctcagcagaggtcctgtgcaaatcttacccatcggaattcatctcatatttccactattgtcgctccctgcgatttgaagacaggccagattactcttttctgaagaaactctttcgtgatgtatttatccgggaaggataccaatttgattatgtatttgactggactgcactcaagtaccctcaaatgggttccaacaacaagcttgttcaacaaccaagtgcaagaatggctggagttggaccatcagttgagagaacagacaaagcttctgtgggacaagagatccgggaaagattcactggtgctgttgaggcattcgccagaagaaatccaggctctggccgccatggagatcattccaggcacaaaagccttgcagattcctttggaacatccaacgaagcagtcgctgccgactcagagaaaacgcgcatcttgtcccggggagggagctcgtcgaaaatgcccgcggctaattcgtccggccggccgacctcttcgggggactgcagtgaccagaaccgccggtgggtctctggcagcagtggcggcagcgggcgcccgtccaccgcgcagaggctccaccactcgggaggcgccgagaacagcaggtcgtccccgcgctctcccgtggcccggaacgcggctgggagaggaggctccggctcgcgggacaacacgacgttccggagcctcgagcgcctctccatcaccaccagcaggaggaagtga

SEQ ID NO: 253 - protein, 479 aa, Sorghum bicolor
MEHVIGGKYKLGRKIGSGSFGELYLGVNIQNGEEVGIKLEPVKTKHPQLHYESKVYMLLQGGNGIPHLKWYGVEGEYNVMVIDLLGPSLEDLFNCCNRKFSMKTVLMLADQLINRVEYMHSKGFIHRDIKPDNFLMGLGRKANQVYIIDYGLAKKYKDLQTHKHIPYRENKNLTGTARYASVNTHLGIEQSRRDDLESVGYLLLYFLRGSLPWQGLKAGTKKQKYDKISEKKMLTSAEVLCKSYPSEFISYFHYCRSLRFEDRPDYSFLKKLFRDVFIREGYQFDYVFDWTALKYPQMGSNNKLVQQPSARMAGVGPSVERTDKASVGQEIRERFTGAVEAFARRNPGSGRHGDHSRHKSLADSFGTSNEAVAADSEKTRILSRGGSSSKMPAANSSGRPTSSGDCSDQNRRWVSGSSGGSGRPSTAQRLHHSGGAENSRSSPRSPVARNAAGRGGSGSRDNTTFRSLERLSITTSRRK

SEQ ID NO: 254 - DNA, 1398 bp, Sorghum bicolor
atggagcacgtggttggagcgaggtttaagcttgggaagaagatagggagcggatctttcggggagctctatctcggcgtcaacatacagaacggcgaggaggtggctatcaagttggaatctgtgaaatcaaggcatcctcagcttatttatgaatcgaaaatatacatgtttctccatggaggaactggaattcctaatttgaaatattttggagtggagggtgattacaatgtcatggtcattgatcttcttggtccaagtctcgaagacttgttcaactactgcaacagaaagttctctcttaaaacagtacttatgctagctgatcagatgatagccagggtagagtatatgcacacgagagggtttcttcatcgtgatatcaagccagacaacttcctcatgggcttaggctgtaaagcaagtcaggtttatgtcattgactatggccttgcgaagaagtatcgagacctccatactcatagacacataccatacagggaggacaaaaacctcacaggaacagcacgatatgctagtgtaaacacccatcttggagtagaacaaagcaggagagacgacttagagtctcttggttatgtgctgatgtacttcttaagaggaagccttccctggcaaggcctgaaagctggaacgaaaaaacaaaagtatgacaaaattagtgagaagaaaatgctaacctcaattgaggccctttgtaaatcttatccatcagaattcattacatacttccattattgccgctctttgcgatttgaagataagccagactatagctatttgaagaaaatcttccgggatttattcatccgtgaaggttaccagcctgattatgtatttgattggactgtatcaaggcaagctgcggacaataacagattgcgactgagcgggaagacaggtgggttggtgggaccatctgtggatcgggctgaacgagctgcagcaagacatgatgttgcggaaagattcactggtccagctgatgcatttactagaagaactggctctggttctggtcattatggagaacacacaaagcacagaactctgttggattctcttatggcatccaagatggctgttgattcagataaaagaaggcattcatcatctcggaatggaagcacatcaaggaaggctcttctgtcaagcagccgaggttctggagatcccagtgatccaaatcgcagtagccacctagtcccgaccactactagcagcagccgtccatcgactaatcaaaggcttcaccagtcaactggacttgagggcaggacctcatcatttccaaaagctggaagaatcggccatgatgatcctactatgaggagtattggacgccttactattagcgcagagaggaggaaatga

SEQ ID NO: 255 - protein, 465 aa, Sorghum bicolor
MEHVVGARFKLGKKIGSGSFGELYLGVNIQNGEEVAIKLESVKSRHPQLIYESKIYMFLHGGTGIPNLKYFGVEGDYNVMVIDLLGPSLEDLFNYCNRKFSLKTVLMLADQMIARVEYMHTRGFLHRDIKPDNFLMGLGCKASQVYVIDYGLAKKYRDLHTHRHIPYREDKNLTGTARYASVNTHLGVEQSRRDDLESLGYVLMYFLRGSLPWQGLKAGTKKQKYDKISEKKMLTSIEALCKSYPSEFITYFHYCRSLRFEDKPDYSYLKKIFRDLFIREGYQPDYVFDWTVSRQAADNNRLRLSGKTGGLVGPSVDRAERAAARHDVAERFTGPADAFTRRTGSGSGHYGEHTKHRTLLDSLMASKMAVDSDKRRHSSSRNGSTSRKALLSSSRGSGDPSDPNRSSHLVPTTTSSSRPSTNQRLHQSTGLEGRTSSFPKAGRIGHDDPTMRSIGRLTISAERRK

SEQ ID NO: 256 - DNA, 1467 bp, Saccharum officinarum
atggatcatgtggtcgggggcaagttcaagctcggcaagaagatcgggagtggatcattcggggagctcttcctcgctgtgaatgtgcagactggagaggaggtcgccgtcaagctggaaaatgtcaagacaaagcacccgcagcttcattacgagtcaaagctatacatgcttctccaaggaggaactggcattccacacctgaagtggttcggcgttgagggggagtataatgtgatggtgattgatcttcttggccctagccttgaggacttgttcaactattgcagtaggaagttctctctgaagactgtgctcatgcttgctgaccaaatgattaatcgggttgagtacatgcatcaaaaggggtttcttcaccgtgatataaaacctgataatttccttatggggcttggtaggaaagccaatcaggtatatataatagactatggactggcaaagaagtatagggaccttcaaacccataagcacatcccgtacagagagaacaagaacctcactggaactgcacgatatgcaagtgtcaatacccaccttggcgttgagcaaagcaggagagatgatttagagtctcttggttatgttcttatgtacttccttaggggcagcctaccatggcaggggctgaaagcaggaaccaagaagcagaaatatgacaaaatcagtgagaaaaagatgcttactcccgtggaggtactctgcaaatcgtatccatcagagtttatctcctatttccactactgtcgttcattgcggtttgaagacaagcctgattattcttacctgaagagactcttccgtgatctctttattcgggaaggataccagtttgactatgtgtttgactggaccattttgaagtatcctcagataggctccaacccgcggatgagggcaggggaaagaactaatggagctgctggaccctcaatggataagattgagaagaccccaggagaagcgtctggtagaaggaatcctagtggttctgtgaatcagagtgacaattatgcacaacgaccacgtgagaccgtatctatgtcattaaaggaaattatgcatagcactgaccggtctggggaaaggactgtggagagaccacgcacatcctcacgcacaggcagtgcatcccgcagagctgttgcatcaagcagcaggccagcctcatctgtggaaccaagtgagcagtataaccggacaagcagattgttctctagcaacagtggcagtcgcccatctagcacccaaagagttaacccatcaccaggcgagtcaagggctacctccctctcacgggcggcagttcgagaggctcccgtgacgagccactccaccggaggctggagcttctgtccctcggtggtggtaaaaaggaatagtgggaaaggagggaagcggccatctgaaaccggaagggaaaatgcttggttgcgactctgtaaatga

SEQ ID NO: 257 - protein, 488 aa, Saccharum officinarum
MDHVVGGKFKLGKKIGSGSFGELFLAVNVQTGEEVAVKLENVKTKHPQLHYESKLYMLLQGGTGIPHLKWFGVEGEYNVMVIDLLGPSLEDLFNYCSRKFSLKTVLMLADQMINRVEYMHQKGFLHRDIKPDNFLMGLGRKANQVYIIDYGLAKKYRDLQTHKHIPYRENKNLTGTARYASVNTHLGVEQSRRDDLESLGYVLMYFLRGSLPWQGLKAGTKKQKYDKISEKKMLTPVEVLCKSYPSEFISYFHYCRSLRFEDKPDYSYLKRLFRDLFIREGYQFDYVFDWTILKYPQIGSNPRMRAGERTNGAAGPSMDKIEKTPGEASGRRNPSGSVNQSDNYAQRPRETVSMSLKEIMHSTDRSGERTVERPRTSSRTGSASRRAVASSSRPASSVEPSEQYNRTSRLFSSNSGSRPSSTQRVNPSPGESRATSLSRAAVREAPVTSHSTGGWSFCPSVVVKRNSGKGGKRPSETGRENAWLRLCK

SEQ ID NO: 258 - DNA, 1401 bp, Triticum aestivum
atggagcatgtgatcggggggaagtttaagctgggtaggaagattgggagcggatctttcggggagctgtatcttggcgtgaacatacagagcagcgaggaggtggctatcaagttggaatctgtcaaatcaaggcatccccagcttcattatgagtcaaaactatatatgcttctgcaaggggggatggggattcctcatctgaaatggtttggagtggacggggagtacaatgtcatggtcattgatcttcttggtccaagtctggaggacttgttcaactattgcaacagaaaatttacccttaaaacagtacttctgcttgctgatcagatgatcgctagggtagagtacatgcactcgaggggctttcttcatcgtgatataaagccagacaactttcttatgggattaggccgtaaagcaagccaggtttatgttattgactatggccttgcaaagaagtaccgggacctccaaactcacaagcacataccatacagggagaacaaaaatcttacaggaacagcacgttatgctagtgtaaatacccatcttggagtagaacaaagcaggagagatgatttagaatctctcggttatgtgctgatgtacttcataagaggaagccttccttggcaaggtctgaaagctggcacgaaaaaacagaagtatgataaaattagtgaaaagaaaatgttaactccagttgaggtcctttgtaaatcttatccatcggagttcgtttcatacttccattactgccgatccttgcgatttgaagataaaccagattactcctatctgaagaaactcttccgagatttatttatccgtgaagggtaccagtctgatcatatatttgactggactgtgtcgaggcaagtagcagagaataacagattgcgaccaagtggaaggacagctgggttggtgggaccatctgcagaacgggctgaacggattgcagcaagacaggatggtcctgatagattctctagttcagtggaaacatttgccagaagaactggctctggttctggccatcatggagaaaacacgaagcacagaactctgtttgattctctgttggcacctaagatggctgctgattcggataaaagaaggcctacatcatcccggaatgggagcacatcgaggaaggctctcctgtcaagcagcagaccaagttctggagagcccagtgaccccactcgcactagccacctaatcccaactagcagtggcagcagtcgtccatcaaccactcagaggcttcaccaatcaactggtcttgaggccaggtcctcctcgctgtcgaaaactgcgagaaatgtccatgatgatcccacgataaggacatttgagcgccttacaattagtgcagacaggaggaaataa

SEQ ID NO: 259 - protein, 466 aa, Triticum aestivum
MEHVIGGKFKLGRKIGSGSFGELYLGVNIQSSEEVAIKLESVKSRHPQLHYESKLYMLLQGGMGIPHLKWFGVDGEYNVMVIDLLGPSLEDLFNYCNRKFTLKTVLLLADQMIARVEYMHSRGFLHRDIKPDNFLMGLGRKASQVYVIDYGLAKKYRDLQTHKHIPYRENKNLTGTARYASVNTHLGVEQSRRDDLESLGYVLMYFIRGSLPWQGLKAGTKKQKYDKISEKKMLTPVEVLCKSYPSEFVSYFHYCRSLRFEDKPDYSYLKKLFRDLFIREGYQSDHIFDWTVSRQVAENNRLRPSGRTAGLVGPSAERAERIAARQDGPDRFSSSVETFARRTGSGSGHHGENTKHRTLFDSLLAPKMAADSDKRRPTSSRNGSTSRKALLSSSRPSSGEPSDPTRTSHLIPTSSGSSRPSTTQRLHQSTGLEARSSSLSKTARNVHDDPTIRTFERLTISADRRK

SEQ ID NO: 260 - DNA, 1395 bp, Vitis vinifera
atggatcatgtgattggtgggaagtttaagctcggccgcaagatcgggagtggatcgttcggagagctttacttagggattaatgtacaaactggagaagaagtggctgttaagctggaacctgtaaagacaaagcaccctcaacttcactatgagtccaaattgtatatgcttcttcaaggaggaactggcgttccccatctcaaatggtttggagttgagggtgaatacaatgccatggtcattgaccttcttggaccaagccttgaggacttgttcaactactgcaatcggaaattttcattgaaaacagttttaatgctcgcagatcaactaattaatagagttgaatatatgcactcaaggggttttcttcaccgtgatataaagcctgataactttttaatgggtttaggacgaaaagcaaatcaggtttacatcattgattatggccttgctaagaagtaccgagattttcagacacacaagcacataccttacagagaaaacaagaatctcactggaacagctcgctatgcaagtgttaacacacacctcggagttgaacaaagcaggagagatgatctggaatctcttggttatgtgctaatgtattttttgaggggaagccttccatggcagggcttgaaagccggtactaaaaaacagaaatatgacaagatcagtgaaaagaagatgctgactcccatagaggtactttgcaaatcatatccatcagagttcacatcatatttccattactgtcgatcattgcggtttgatgacaaaccagattattcatacctgaagaggcttttccgggacctatttattcgtgaaggttatcagtttgattatgtatttgactggaccgtactcaagtatccgcaaattggatccagttctagagtgcggcagcctagtggaaaaccagctttaaatcctggaccatctgcagaaagaatggagcggccatcagtgggacaagagattcgagatagattctcaggtgcagttgaagcattttctagaaggaacaactcaggttctggttatcatggtgaccagtccaggcacagaggttcggaggatgtaccatcttcaaaggatgtgcaaactgattctgaaagaccccggagctcctctcgaaatggcagtacttcaaagagggctgttgtatcaagcagccgcccaagctcctctggtgaacctactgagactcgtgcaagccgtctggtctcaggcagtggccgcttgtctacgactcaaaggagccaacctggttttgaatcgaaatcatcatctttcactcgtgcttctgcagcaagaggtgggcgtgaagatcctctacggagctttgagctcctaacgattggctctgggaagaagaaatga

SEQ ID NO: 261 - protein, 464 aa, Vitis vinifera
MDHVIGGKFKLGRKIGSGSFGELYLGINVQTGEEVAVKLEPVKTKHPQLHYESKLYMLLQGGTGVPHLKWFGVEGEYNAMVIDLLGPSLEDLFNYCNRKFSLKTVLMLADQLINRVEYMHSRGFLHRDIKPDNFLMGLGRKANQVYIIDYGLAKKYRDFQTHKHIPYRENKNLTGTARYASVNTHLGVEQSRRDDLESLGYVLMYFLRGSLPWQGLKAGTKKQKYDKISEKKMLTPIEVLCKSYPSEFTSYFHYCRSLRFDDKPDYSYLKRLFRDLFIREGYQFDYVFDWTVLKYPQIGSSSRVRQPSGKPALNPGPSAERMERPSVGQEIRDRFSGAVEAFSRRNNSGSGYHGDQSRHRGSEDVPSSKDVQTDSERPRSSSRNGSTSKRAVVSSSRPSSSGEPTETRASRLVSGSGRLSTTQRSQPGFESKSSSFTRASAARGGREDPLRSFELLTIGSGKKK

SEQ ID NO: 262 - DNA, 1329 bp, Vitis vinifera
atggagcatgtaatcggtgggaagttcaagatgggaaggaaaattgggagtgggtcttttggggagctatacataggtgttaatgtacaaagtggggaggaagtggccatcaaggtggaacctaccaaaactaagcaccctcaacttcaatatgaatcaaagttgtacatgcttctccaaggaggaacgggaattccccacctcaagtggtttggagttgagggcgagtacaatgtcatggtcattgaccttcttggaccgagcttggaagacctgttcaactattgcaataggaagttcacattgaagacagtattgatgcttgcagatcaattaattaacagagttgaatacatgcattcaagaggttttcttcaccgtgatataaagcccgacaactttttaatgggcctagggcgcagggcaaatcaggtgtatgccattgattttggccttgctaaaaagtatagggatctacagacacataaacacattccatacagggaaaataagaacctcacaggcacagctcgctatgcaagtgttaacacccatctaggagttgagcaaagcagaagggatgatctggaatctctaggctacgtgcttatgtatttcctaagaggaagccttccctggcaggggctgaaagctggcaccaaaaagcagaaatatgataagatcagtgaaaagaagatgttaactcccatagaggtactttgcaaatcatatccgtcagagttcacatcatactttcactattgccgatcattgcgatttgaagacaagccagattattcatatctgaagaggctcttccgggacttattcattcgagaaggttatcaatttgactatgtatttgactggactatattgaagtaccctcagattggtgccagctctagaggacggcattccactggcaaagcaggtttaaatgctggaccatcagctgaaagactggataggacctcaggtggcaagagattcgggatagattctctggtgcagttgaaacattcccccgaagaaatgcttttggttctggtttgcacagtgaccattccaaaaaccggacttcagatggtgtaccctcatccaaggatgtgcaagcagattcagaaagaggccgcacttcccgaaatggaagcacttcaaaaagagctctcatctcaagcagcaggccaagctcctctggagaacccagtgaaggacgcagccgcatggtttgagtccaaatcatcgtcatttacacgcactgcagcaacaaaaggcacacgagatgaccctctgaggagctttgagctgctctcaatcaggaagtga

SEQ ID NO: 263 - protein, 442 aa, Vitis vinifera
MEHVIGGKFKMGRKIGSGSFGELYIGVNVQSGEEVAIKVEPTKTKHPQLQYESKLYMLLQGGTGIPHLKWFGVEGEYNVMVIDLLGPSLEDLFNYCNRKFTLKTVLMLADQLINRVEYMHSRGFLHRDIKPDNFLMGLGRRANQVYAIDFGLAKKYRDLQTHKHIPYRENKNLTGTARYASVNTHLGVEQSRRDDLESLGYVLMYFLRGSLPWQGLKAGTKKQKYDKISEKKMLTPIEVLCKSYPSEFTSYFHYCRSLRFEDKPDYSYLKRLFRDLFIREGYQFDYVFDWTILKYPQIGASSRGRHSTGKAGLNAGPSAERLDRTSGGKRFGIDSLVQLKHSPEEMLLVLVCTVTIPKTGLQMVYPHPRMCKQIQKEAALPEMEALQKELSSQAAGQAPLENPVKDAAAWFESKSSSFTRTAATKGTRDDPLRSFELLSIRK

SEQ ID NO: 264 - DNA, 1407 bp, Zea mays
gtcatttacagagtcgcaaacaagcgttcttcccttccgcccgctctcagatgctcgctttccttgccactacttccttttcccgccgccaccgagggacagaagctccaggctgcgatggagtggctcgtcgcgagcgcctctcgcgactgccgcccgtgagagggaggtagcccttgcctcgcctggcgatgggttcaccctctgggtgctagatgggcgactgccactgttgctagagaacaatctgcttgcccggctatactgctgctcacttggttccacagatgaggcctgcctgctgcttgatgcaacagctctacgggatgcactgcctgtgcgcgaggatgtacgtggtctctccatggtcctttccccagaccggtcagtgctatgcataatttcctttaatgacatagatacggtctcacgcggtcgttgtgcataactgtcagtctggttcacaggaccactaagattccttctaccggctgcttctcctgtggccttctcaatcttgtccatcgagggtccagcagctccactagtcctttcacctgccctcatccgcgggttggagcctatctgaggatacttcagaatggtccagtcgaacacatagtcaaactggtatccttcccgaataaagagatcgcggaatagtctcttcaggtaagagtaatcaggcttgtcttcaaaccgcaatgaacgacagtagtggaaataggagataaattctgatggatacgatttgcagagtacctccacgggagtgagcatctttttctcgctgattttgtcatatttctgcttcttggtccctgctttcagcccctgccatggtaggctgcccctaaggaagtacataagaacgtaaccaagagattctaaatcatctctcctgctttgctcaacgccaaggtgggtattgacactcgcatatcgtgcagttccagtgaggttcttgttctctctgtatgagatgtgcttatgagtttgaagatccctatatttctttgcgagtccatagtctattatatatacctgattggctttcctaccaagccccataagaaaattatcaggctttatatcacggtgcagaaaccccttttgatgcatgtactcgacccgattaatcatttggtcagcaagcatgagcacggtcttgagagaaaactttctactgcaatagttgaacaagtcctcaaggctagggccgagaagatcgatcaccatcacgttatactccccctcaacgccgaaccacttcaggtgcggaatgccagttcctccttggagaagcatgtatagcttggactcgtagtgaagctgcgggtgcttcgtcttgacattttccagcttgacggcgacctcctctccggtctgcacgttcacagctaggaa

SEQ ID NO: 265 - protein, 468 aa, Zea mays
MDHVVGGKFKLGKKIGSGSFGELFLAVNVQTGEEVAVKLENVKTKHPQLHYESKLYMLLQGGTGIPHLKWFGVEGEYNVMVIDLLGPSLEDLFNYCSRKFSLKTVLMLADQMINRVEYMHQKGFLHRDIKPDNFLMGLGRKANQVYIIDYGLAKKYRDLQTHKHISYRENKNLTGTARYASVNTHLGVEQSRRDDLESLGYVLMYFLRGSLPWQGLKAGTKKQKYDKISEKKMLTPVEVLCKSYPSEFISYFHYCRSLRFEDKPDYSYLKRLFRDLFIREGYQFDYVFDWTILKYPQIGSNPRMRAGERTSGAAGPSMDKIEKATGEAAGRRNLSGPVNQTDSYAQRPRETVSMSLKEIMHSTDRSGERTMERPRTSSRTGSASRRAVASSSRQASSVEPSEQQYSRASRLFSSNSGSRPSSTQRVNPSPGEARATSLSRAAVARGARDEPLHRSLELLSLGGGGKRK

SEQ ID NO: 266 - DNA, 1347 bp, Zea mays
atggagcacgtagtcgggggcaagttcaagctcgggaagaagatcgggagtggatcatttggggaactttacctcgccgtgaacgtgcagaatggcgaggaggtggctgtcaaactggaatcagtcacatcacgacatccacagcttcactatgaatcaaaactatacatgcttttgcagggtggaactgggattccacatcttaagtggttcggggtggaggggcagtacaatgtcatggtgattgatctgcttggtccaagtctggaggacttatttaactactgcagcagaaagttctcccttaaaacagtactaatgcttgctgatcagatgatcagtagagtagaatacatgcacacaagggggtttctacatcgtgacatcaagcctgataattttctcatgggtttaggacgtaaagcaaaccaggtatttgtcatcgactatggccttgcgaagaagtatcgagatctccaaactcataagcacataccatacagggaaaacaaaaatctcacaggaacagcacgatatgccagtgtaaatacccaccttggagttgagcaaagcagaagagatgatctggaatctcttggttatgtgctcatgtatttcttaagaggaagtctcccttggcaaggcctgaaagctggcacaaagaagcagaagtatgataggatcagtgaaaagaaaatgctgacgccagttgaggtcctctgtaaatcatatccatcagagtttactgcatactttcattactgtagatcactacgattcgaagataaaccagattactcctatttgaagagactcttccgtgacttatttatccgcgaggggtaccaactagattatgtatttgactggaccattatgaaatatcctcagtttagagataaaagcaaaattcagtctagcggcaagatgagtgggttggcaggcccttctgcagaaaggactgatagaactgcagctgaagctttgtttagaaggactggatctggttctggtcacaatcgagagcacaccaagcacagaagtcttctggagtcactgatgccatccaaggctgttgattcggataaagcaaggccacaatcatcgtcgcgcaacgggagcacatcaagaagagctgtcatttcatcaagcaaaccaagctcttctggggatctaagcgacccgaaccgcttggggggccgcctggcccctagtagcagcagccgcccaccgactgcccaaagggagatcagatcctcgtctttgtcaaaaatcggaaggtcttcacatgacgacgctatcaggaacctcgagctgctctcacttggtgctgacaagagaaaataa

SEQ ID NO: 267 - protein, 448 aa, Zea mays
MEHVVGGKFKLGKKIGSGSFGELYLAVNVQNGEEVAVKLESVTSRHPQLHYESKLYMLLQGGTGIPHLKWFGVEGQYNVMVIDLLGPSLEDLFNYCSRKFSLKTVLMLADQMISRVEYMHTRGFLHRDIKPDNFLMGLGRKANQVFVIDYGLAKKYRDLQTHKHIPYRENKNLTGTARYASVNTHLGVEQSRRDDLESLGYVLMYFLRGSLPWQGLKAGTKKQKYDRISEKKMLTPVEVLCKSYPSEFTAYFHYCRSLRFEDKPDYSYLKRLFRDLFIREGYQLDYVFDWTIMKYPQFRDKSKIQSSGKMSGLAGPSAERTDRTAAEALFRRTGSGSGHNREHTKHRSLLESLMPSKAVDSDKARPQSSSRNGSTSRRAVISSSKPSSSGDLSDPNRLGGRLAPSSSSRPPTAQREIRSSSLSKIGRSSHDDAIRNLELLSLGADKRK

SEQ ID NO: 268 - DNA, 1398 bp, Zea mays
atggagcacgtgatcggagggaagtttaagcttgggaagaagatcgggagcggatctttcggggagctctatctcggtgtcaacgtacagagcggcgaggaggtggctatcaagttggaatctgtaaaatcaaggcatcctcagcttcattatgagtcaaaactatacatgcttctccaagggggaactggaattcctcatttgaaatggtttggagtggatggggagtacaatgtcatggtcattgatcttcttggtccaagcctcgaagacttgttcaactactgcaacagaaagttttctcttaaaacagtacttatgctagctgatcagatgatatctagggtagagtacatgcacacgagggggtttcttcatcgtgatatcaagccagacaacttcctcatgggcttaggccgtaaaacaagtcaggtttatgtcattgactatggccttgcgaagaagtatcgggacctccaaactcatagacacattccatacagggagaacaaaaacctcacaggaacagcacgatatgctagtgtaaacacccatcttggagtagaacaaagcaggagagatgacttagagtctcttggttatgtgctgatgtacttcttaagaggaagccttccttggcaaggcctgaaagctggaacgaaaaaacaaaagtatgacaaaatcagtgagaagaaaatgctaacctcaattgaggccctgtgtaaatcttatccatcagaatttgttacatatttccattattgccgctctttgcaatttgaagataagccagactacagctatttgaagaaaaattttcgggatttattcatccgtgaaggttgccagcctgattatgtatttgattggactgtatcaaggcaagctgcggacaataacagattgcgactgagtgggaagacaggtgggttggtgggaccatctgtggatcgggctgaacgagctgcagcaaaacaggatgttccacatagattcactggtccagctgatgcattggctaaaagaaccggctctggttctggtcattatggagaacacacaaagcacagaactctgttggattcccttatggcatccaatatgggtgttgactcggataaaagaaggcattcatcgtctcgcaatggaagcacatcaaggaaggctcttctgtcaagcaaccgaggttctggagaccccagtgaaccaaatcgcagcagccacctagttccgaccaccaccagcagcagccgtccatcgaccaatcaaaggcttcaccactcaactggacttgagggcaggaccccatcatttccaaaacctggaagaatcggctatgatgatcccacaatgaggagttttgaacgccttactattagcgcagagaggaggaaatga

SEQ ID NO: 269 - protein, 465 aa, Zea mays
MEHVIGGKFKLGKKIGSGSFGELYLGVNVQSGEEVAIKLESVKSRHPQLHYESKLYMLLQGGTGIPHLKWFGVDGEYNVMVIDLLGPSLEDLFNYCNRKFSLKTVLMLADQMISRVEYMHTRGFLHRDIKPDNFLMGLGRKTSQVYVIDYGLAKKYRDLQTHRHIPYRENKNLTGTARYASVNTHLGVEQSRRDDLESLGYVLMYFLRGSLPWQGLKAGTKKQKYDKISEKKMLTSIEALCKSYPSEFVTYFHYCRSLQFEDKPDYSYLKKNFRDLFIREGCQPDYVFDWTVSRQAADNNRLRLSGKTGGLVGPSVDRAERAAAKQDVPHRFTGPADALAKRTGSGSGHYGEHTKHRTLLDSLMASNMGVDSDKRRHSSSRNGSTSRKALLSSNRGSGDPSEPNRSSHLVPTTTSSSRPSTNQRLHHSTGLEGRTPSFPKPGRIGYDDPTMRSFERLTISAERRK

SEQ ID NO: 270 - DNA, 54 bp, Artificial sequence
  primer: prm09973
ggggacaagtttgtacaaaaaagcaggcttaaacaatggatcgtgtggttggtg

SEQ ID NO: 271 - DNA, 50 bp, Artificial sequence
  primer: prm09974
ggggaccactttgtacaagaaagctgggttaaagccaagcctctcacttc

SEQ ID NO: 272 - DNA, 2194 bp, Oryza sativa; identical to SEQ ID NO: 184

SEQ ID NO: 273 - protein, 50 aa, Artificial sequence
  motif 10
  VARIANT (19)..(19): / replace = "Met"
  VARIANT (25)..(25): / replace = "Val"
  VARIANT (46)..(46): / replace = "Leu"
HIPYRENKNLTGTARYASVNTHLGIEQSRRDDLESLGYVLMYFLRGSLPW

SEQ ID NO: 274 - protein, 45 aa, Artificial sequence
  motif 11
  VARIANT (9)..(9): / replace = "Phe"
  VARIANT (11)..(11): / replace = "Ser" / replace = "Gly"
  VARIANT (14)..(14): / replace = "Leu"
  VARIANT (26)..(26): / replace = "Leu"
  VARIANT (30)..(30): / replace = "Ile"
  VARIANT (32)..(32): / replace = "Phe"
  VARIANT (33)..(33): / replace = "Met"
  VARIANT (36)..(36): / replace = "Arg"
  VARIANT (37)..(37): / replace = "Gly"
PSLEDLFNYCNRKFSLKTVLMLADQMINRVEYVHSKSFLHRDIKP

SEQ ID NO: 275 - protein, 48 aa, Artificial sequence
  motif 12
  VARIANT (2)..(2): / replace = "Arg"
  VARIANT (3)..(3): / replace = "Gly"
  VARIANT (6)..(6): / replace = "Thr"
  VARIANT (22)..(22): / replace = "Glu"
  VARIANT (24)..(24): / replace = "Arg"
  VARIANT (26)..(26): / replace = "Ala"
  VARIANT (33)..(33): / replace = "Ile"
  VARIANT (43)..(43): / replace = "Tyr"
CKSYPSEFASYFHYCRSLRFDDKPDYSYLKRLFRDLFIREGFQFDYVF

SEQ ID NO: 276 - protein, 50 aa, Artificial sequence
  motif 13
  VARIANT (7)..(7): / replace = "Val"
  VARIANT (10)..(10): / replace = "Phe"
  VARIANT (23)..(23): / replace = "Arg"
  VARIANT (48)..(48): / replace = "Ile"
KANQVYIIDYGLAKKYRDLQTHKHIPYRENKNLTGTARYASVNTHLGVEQ

SEQ ID NO: 277 - protein, 50 aa, Artificial sequence
  motif 14
  VARIANT (9)..(9): / replace = "Thr" / replace = "Ile"
CKSYPSEFVSYFHYCRSLRFEDKPDYSYLKRLFRDLFIREGYQFDYVFDW

SEQ ID NO: 278 - protein, 50 aa, Artificial sequence
  motif 15
  VARIANT (11)..(11): / replace = "Ser"
  VARIANT (14)..(14): / replace = "Leu"
  VARIANT (15)..(15): / replace = "Thr"
  VARIANT (26)..(26): / replace = "Met"
PSLEDLFNYCNRKFSLKTVLMLADQLINRVEYMHSRGFLHRDIKPDNFLM

SEQ ID NO: 279 - DNA, 1707 bp, Populus trichocarpa
atggaaagagataagttgtttgtgagcgagggagccaacacagcagcaaccatttggaattcttgcagttttggaatggaaatgcaagccaatgagctgagttgcggtccagagaaacttgccaattgctttctcaatcccaattgggacaactcattggatcagagcgatccctttgagtctgctttgagctccattgtctcatcacctgttgcatccggtgccaacgcaaacgccaacgccattcctaatgctggcgttggtggtgacagtcttatgattagagaacttattggaagactaggaaacatttgcaattctggagacatttcactacaatcttttgttaacaataataacaatagcactaacacttcttgctatagtaccccaatgaattcccctccaaagctgaatctctcgatgatggattcacaaatgagaggaaacctgccaattcctggaaacagcgtagtaaagcatccaggtttagcaccatttccagctgattttgtagagagggctgcacgatattcttgctttggtagcaacaatcctggaggcatcaataaacaattcggattgaatgaatccgaattgatcaataggttgatgccacgagtagaacctggtaagctctcgagagtttcgagtaacaattcaatgaaggtcactgtatcgcaagcaaatgttcaagaaagcaacaagagctcaccccaggatgggagtttgaattctgaaaagaaattcagtaggcagtcaaggcctacaacatcagagaatggagattccagggaagaatcttcattgtctgagcaggtcccaggtgggaaattgagcatgaaatcccagaatgacgccaattccaggaaaagaaaatcaattcccagaggaaaagccaaagaaactccctcttcatctccatctgcttctgatgtcaaggttgcagcagagaatgatgaatcgaaggcaaaaagaagcaaatcggatgaaactaatggcagtgacaaggatacagcaaaggaaaaggaagaagaaaatggaaatcagaaacagaacaaaaataattcaaagccgccagagccaccaaaggattatatccatgtcagagccagaaggggtcaggctacagatagccacagtcttgctgaaagagttagaagagagaaaatcagtgaaagaatgaagttcctccaggatcttgttcccggatgcaataaggttactgggaaagcagtgatgcttgacgagattataaactatgtacagtcattgcagcgccaggttgagtttctgtcaatgaagttgtcatctgtgaatccgaggatggagatcaacatggaaactttgttgtccaaggatattttccaatcccgtggatctatgccacatagtctttatccattagatgcctccacgccggtattcccttatggttaccaatcccagcaagggttagccctgcaaaatggcatgccaagcaatgccgaaacccagttctctatgaacccattaaatgctgcgttgcggcgaaacccgagcatgcatttgccacaccttgatggtttcggtgatcctgctgctcttcaggcctcagccatgtgggaagacgaccttcaaagtgttgtgcagatgggatatggtcagaatcatcaggagagctttcaaggctcagtgccctcaactcaaatgaaaattgagctataa

SEQ ID NO: 280 - protein, 568 aa, Populus trichocarpa
MERDKLFVSEGANTAATIWNSCSFGMEMQANELSCGPEKLANCFLNPNWDNSLDQSDPFESALSSIVSSPVASGANANANAIPNAGVGGDSLMIRELIGRLGNICNSGDISLQSFVNNNNNSTNTSCYSTPMNSPPKLNLSMMDSQMRGNLPIPGNSVVKHPGLAPFPADFVERAARYSCFGSNNPGGINKQFGLNESELINRLMPRVEPGKLSRVSSNNSMKVTVSQANVQESNKSSPQDGSLNSEKKFSRQSRPTTSENGDSREESSLSEQVPGGKLSMKSQNDANSRKRKSIPRGKAKETPSSSPSASDVKVAAENDESKAKRSKSDETNGSDKDTAKEKEEENGNQKQNKNNSKPPEPPKDYIHVRARRGQATDSHSLAERVRREKISERMKFLQDLVPGCNKVTGKAVMLDEIINYVQSLQRQVEFLSMKLSSVNPRMEINMETLLSKDIFQSRGSMPHSLYPLDASTPVFPYGYQSQQGLALQNGMPSNAETQFSMNPLNAALRRNPSMHLPHLDGFGDPAALQASAMWEDDLQSVVQMGYGQNHQESFQGSVPSTQMKIEL

SEQ ID NO: 281 - DNA, 1461 bp, Arabidopsis thaliana
atggatttaagtgcgaaagatgagttttcagcagagaagaggaatcctgataactatgattctgttaataatccgtctggagattggcgagttgattcatatccttcagagaatctgatttcagctggtcctgcgtcttgttctccttctcagatgatggattcatttgggcaaactctttggtatgatcccacgagtgttcaggctgttggttatgccggttttaatggtggtaatgcttcgtcttcttcgtttaggggtagtattgatagatctcttgaaatgggttggaatctgcctaatttgttgcctcctaaaggcaatggtcttttcttaccgaatgcgagtagtttccttcctccgagtatggctcagttcccggctgattcaggttttatagagcgtgcagcgaggttttcgctctttagcggtgggaattttagtgatatggtgaatcaaccacttgggaattctgaggctattggtttgtttcttcaaggtggtggaacaatgcaagggcagtgtcaaagtaatgaacttaatgttggtgaacctcacaatgatgtatctgtagcagtgaaagaatcaactgttagatctagtgaacaagctaaaccgaatgttcctggatcgggcaatgtatccgaggatactcagtctagtggtggtaatggtcagaaaggcagagaaacctcttccaacacaaagaagaggaaaagaaatgggcagaagaactctgaagcagctcaatcacacagatcccagcagtctgaggaagaaccagacaacaatggtgatgaaaagcgcaatgatgagcaaagtccaaattcacctggaaagaagtcaaacagtgggaaacaacagggcaaacaaagttctgatcctccaaaagatggatatattcatgtacgggcacgaagaggccaggccacaaatagccatagtcttgcagaaagagttaggagagaaaaaattagtgaaaggatgaagtttcttcaagatctagtaccgggttgcaacaaggtgactgggaaggcagttatgcttgacgaaatcataaactacgtacaatcactacaacgccaagttgagtttttatcgatgaaacttgcaactgtgaacccacaaatggactttaaccttgaaggtcttcttgcaaaagatgcacttcaactacgagctggttcttcatctacaacaccattcccaccaaatatgtcaatggcttatcctcctctacctcatggattcatgcaacaaactctttccagcattggaaggaccattacctctccattgtctcctatgaatggtggattcaagcgacaggaaacaaatggatgggagggtgatttgcaaaatgtgatccacattaactatggagctggtgatgtcacacctgaccctcaagcagcagctacagcatctcttccagctgcaaatatgaaggttgagccatga

SEQ ID NO: 282 - protein, 486 aa, Arabidopsis thaliana
MDLSAKDEFSAEKRNPDNYDSVNNPSGDWRVDSYPSENLISAGPASCSPSQMMDSFGQTLWYDPTSVQAVGYAGFNGGNASSSSFRGSIDRSLEMGWNLPNLLPPKGNGLFLPNASSFLPPSMAQFPADSGFIERAARFSLFSGGNFSDMVNQPLGNSEAIGLFLQGGGTMQGQCQSNELNVGEPHNDVSVAVKESTVRSSEQAKPNVPGSGNVSEDTQSSGGNGQKGRETSSNTKKRKRNGQKNSEAAQSHRSQQSEEEPDNNGDEKRNDEQSPNSPGKKSNSGKQQGKQSSDPPKDGYIHVRARRGQATNSHSLAERVRREKISERMKFLQDLVPGCNKVTGKAVMLDEIINYVQSLQRQVEFLSMKLATVNPQMDFNLEGLLAKDALQLRAGSSSTTPFPPNMSMAYPPLPHGFMQQTLSSIGRTITSPLSPMNGGFKRQETNGWEGDLQNVIHINYGAGDVTPDPQAAATASLPAANMKVEP

SEQ ID NO: 283 - DNA, 1371 bp, Arabidopsis thaliana
atggagaacgagctgtttatgaatgcaggagtttcgcatccgccggtgatgacgtcaccgtcttcttcgtcggcgatgcttaagtgggtttcaatggagactcagccagtggatccaagtctcagtcgcaatctgttttgggaaaagtcaacggaacagagcatttttgattcggctctgagctcactcgtctcttctcctacgccgtcaaattcaaacttttcggttggcggagtaggtggagaaaatgtcattatgagagagctcatcgggaaactgggtaatatcggcgatatctatggaattacggcgagcaatggaaactcgtgttacgcaactccgatgagctctccaccgcctggaagtatgatggagacgaaaacgacgacgccgatggcagaactgtccggcgacccgggattcgctgagagagcggcgaggttctcgtgttttggtagccggagttttaacagcagaacaaactcgccgtttccgattaataacgaaccacccatcacaaccaatgagaaaatgccacgtgtatcaagcagcccagtttttaagcctcttgcgtctcatgttcccgccggcgaatcgtccggtgaactttcccggaaaagaaaaactaaatccaagcagaattctccttctgcagtttcatcatcaaaggagattgaagagaaggaagattctgatccaaagagatgcaaaaaatcagaagaaaatggagacaaaactaaatcaattgatccttacaaagattacattcatgttagagctcgacgaggccaagccaccgatagtcacagtctcgccgaacgagttcgaagagagaaaataagcgaaagaatgaagctgcttcaagatcttgtccctggatgcaacaaggttactggaaaagcactgatgttggatgaaattataaactatgtccaatcattgcaacgacaagttgagttcttgtcgatgaagttatcgtcagtgaacaccaggctggactttaacatggacgctctcttgtctaaggatatatttccttcaagcaacaatctaatgcatcatcaacaagtacttcaattagattcttcagcagaaacgttattgggtgatcatcacaacaaaaatttgcaattgaaccctgatatttcttctaataacgtaataaaccctttggaaacttctgaaactagaagcttcatttctcacttaccaacacttgctcatttcactgactctatttctcagtattcaacattttccgaagatgatttacatagcattattcatatgggttttgcgcaaaaccgtctccaagaattgaaccaaggttcatcaaaccaagtaccatcgcacatgaaagctgaactttga

SEQ ID NO: 284 - protein, 456 aa, Arabidopsis thaliana
MENELFMNAGVSHPPVMTSPSSSSAMLKWVSMETQPVDPSLSRNLFWEKSTEQSIFDSALSSLVSSPTPSNSNFSVGGVGGENVIMRELIGKLGNIGDIYGITASNGNSCYATPMSSPPPGSMMETKTTTPMAELSGDPGFAERAARFSCFGSRSFNSRTNSPFPINNEPPITTNEKMPRVSSSPVFKPLASHVPAGESSGELSRKRKTKSKQNSPSAVSSSKEIEEKEDSDPKRCKKSEENGDKTKSIDPYKDYIHVRARRGQATDSHSLAERVRREKISERMKLLQDLVPGCNKVTGKALMLDEIINYVQSLQRQVEFLSMKLSSVNTRLDFNMDALLSKDIFPSSNNLMHHQQVLQLDSSAETLLGDHHNKNLQLNPDISSNNVINPLETSETRSFISHLPTLAHFTDSISQYSTFSEDDLHSIIHMGFAQNRLQELNQGSSNQVPSHMKAEL

SEQ ID NO: 285 - DNA, 1497 bp, Arabidopsis thaliana
atggacaacgagctgtttatgaacacagagtttccaccaccgccggagatggcgacgcatttcgaacaccaacagtcttcttcatcggccatgatgcttaattgggctttaatggatccaaatccgcatcaagattcttcctttttatgggaaaagtcaacggaacaacaacaacaacaaagcatctttgactctgctttaagctcattagtctcatcaccgacgccgtcaaattccaacttctccggcggtggcggtgacggttttctcatcagagaactcatcggaaagcttggaaacatcggtaataataataacaactccggtgagatctacggaactccgatgtctcgctccgcctcatgttacgcaactccgatgagctctccaccgccaccgacgaattcgaattctcagatgatgatgaacagaacgacgccgttgacggaattctcagcagatccgggttttgcggagagagcagctagattctcttgttttggtagtcggagctttaacggaagaaccaatacaaatcttccgattaacaacggtaataacatggtcaacaactccgggaagctgacacgtgtctccagcacaccagctcttaaggctcttgtttcaccggaagtcacacccggcggcgaattttcccggaagagaaaatctgtgcctaaaggaaaatccaaagaaaaccccatttctacagcttctccatctcctagtttctcaaagacggcggaaaagaatggtggaaaaggaggaagtaaaagttcagaagaaaaaggaggaaaaaggagaagagaagaagaagatgatgaagaagaagaaggagaaggtgaagggaacaaaagcaataacacaaaaccacctgagcctcctaaagattacattcatgttcgagctcgacgaggccaagcaaccgatagtcacagcctcgccgaacgagttcggagggagaaaattggtgaaaggatgaagcttcttcaagatcttgtgcctggatgcaataaggttactggaaaagcactgatgcttgatgaaattataaactacgtacaatcattgcaaagacaagttgagttcttgtcaatgaagttatcatcagtgaacgacaccaggctggattttaacgtggacgctcttgtgtcaaaggatgttatgattccatcaagtaacaaccgattgcatgaagaaggactccaatcaaagtcttcaagtcatcatcatcaacaacaacttaatatttataacaataattcacaattacttcccaatatttcttccaataacatgatgctccagtctcctatgaactctttggaaacctctaccttagccagaagcttcactcacttaccaacacttacccaatttactgactcaatttctcagtatcaaatgtttagcgaagaagatttacaaagcatagtaggaatgggagtggcagaaaaccccaacaatgaatctcaacacatgaaaattgagctttga

SEQ ID NO: 286 - protein, 498 aa, Arabidopsis thaliana
MDNELFMNTEFPPPPEMATHFEHQQSSSSAMMLNWALMDPNPHQDSSFLWEKSTEQQQQQSIFDSALSSLVSSPTPSNSNFSGGGGDGFLIRELIGKLGNIGNNNNNSGEIYGTPMSRSASCYATPMSSPPPPTNSNSQMMMNRTTPLTEFSADPGFAERAARFSCFGSRSFNGRTNTNLPINNGNNMVNNSGKLTRVSSTPALKALVSPEVTPGGEFSRKRKSVPKGKSKENPISTASPSPSFSKTAEKNGGKGGSKSSEEKGGKRRREEEDDEEEEGEGEGNKSNNTKPPEPPKDYIHVRARRGQATDSHSLAERVRREKIGERMKLLQDLVPGCNKVTGKALMLDEIINYVQSLQRQVEFLSMKLSSVNDTRLDFNVDALVSKDVMIPSSNNRLHEEGLQSKSSSHHHQQQLNIYNNNSQLLPNISSNNMMLQSPMNSLETSTLARSFTHLPTLTQFTDSISQYQMFSEEDLQSIVGMGVAENPNNESQHMKIEL

SEQ ID NO: 287 - DNA, 1173 bp, Arabidopsis thaliana
atgagtgacaaagacgagtttgccgcaaagaagaaggatttggtcaatacgccagtggatttgtatcctccggagaatccaatgttgggtccttctccgatgatggattcattcagagaaactctttggcatgatggtggtttcaatgtccacacagatgcagacacttcctttagaggtaataataatattgatatacctcttgaaatgggttggaatatggctcagttccctgcagattcaggattcattgagcgtgctgcaaagttttctttttttggatgtggtgaaatgatgatgaaccaacaacaatcatctcttggagttccagattcaactggcttgtttcttcaagatacacagattcctagtggatccaaactagataatggtcctcttactgatgcatctaagttagtgaaagagagatcgattaataatgtatcagaggattctcaatctagtggaggtaatggtcatgatgatgctaagtgtgggcaaacatcttccaaggggtttagtagtaagaagaggaaaagaattgggaaggattgtgaagaagaagaagataaaaagcaaaaggatgagcaaagtccaacttcaaatgcgaacaagacaaacagtgagaagcaaccttctgattctttaaaggatgggtatattcacatgagggcacgaagaggccaggctactaatagtcacagtcttgctgaaagagtaagaagagaaaaaatcagtgaaaggatgaagttcttgcaagatcttgtgccaggttgcgacaaggtgactggtaaggcagttatgctcgatgaaatcattaactatgtgcaatcacttcaatgccaaatcgagtttttatcgatgaaactttcggctgtgaatcctgtgctcgattttaacctcgaaagcctccttgcaaaagatgctcttcaatcatctgcaccgacatttccccacaacatgtcgatgctttatcctcctgtatcgtatctctctcaaacaggattcatgcaaccgaacatttcctcaatgtcgctattgagtggaggattaaaacggcaggaaacacatggatatgaaagtgatcaccacaatcttgtccacatgaaccatgaaaccggcactgcacctgatcatgaagatacaacagctgacatgaaggtggagccgtag

SEQ ID NO: 288 - protein, 390 aa, Arabidopsis thaliana
MSDKDEFAAKKKDLVNTPVDLYPPENPMLGPSPMMDSFRETLWHDGGFNVHTDADTSFRGNNNIDIPLEMGWNMAQFPADSGFIERAAKFSFFGCGEMMMNQQQSSLGVPDSTGLFLQDTQIPSGSKLDNGPLTDASKLVKERSINNVSEDSQSSGGNGHDDAKCGQTSSKGFSSKKRKRIGKDCEEEEDKKQKDEQSPTSNANKTNSEKQPSDSLKDGYIHMRARRGQATNSHSLAERVRREKISERMKFLQDLVPGCDKVTGKAVMLDEIINYVQSLQCQIEFLSMKLSAVNPVLDFNLESLLAKDALQSSAPTFPHNMSMLYPPVSYLSQTGFMQPNISSMSLLSGGLKRQETHGYESDHHNLVHMNHETGTAPDHEDTTADMKVEP

SEQ ID NO: 289 - DNA, 1647 bp, Glycine max
atgggaattcaactaacagttatgaattgtgcccctgagcaaacccaagattgcttttacaaccccaattgggacaagtcaacggcagatcatggccttcaccattttgattcctcagcactgagttcaatggtttcatcaccagcagcatcatccaaccccaacaacaagtccaatgagaatttcatcatcagggaattggtggggaaattgggacctattgggagctctgatgagatcccacaacactctcctcaccctttggttgtggcatcttcttgcatgaatagtaatggcaataacagcacctacacttcatgctacagcacccctttgagctcccctccaaaggtgaacattgtccacagtttggtgaatgagaggttggcaaatttgggaggagggaagtcaacaatggctttgaattccagtgtggctgaattctcagctgatcctggctttgctgagagggctgcaaagttttcttgctttggcagcaggagtttcaatgataggagtgtccaattgggggtgaacaatgctgaattggctcaaagatctgcaccagcaatggaacatggtgggaagttgcctagagtctcaagtagtccattgctcaaaacacttggatctcaaatgggtgcccaagagaacaagaattcagcaattcatcaggagcaggagaaaatggaaggggccaattctcaagaggaatctacaatttctgagcaagccccaaatggggaaattggggtgaaaacttcacaggatatgatgaattccaggaaaagaaaagcttcttcgaaaggcaaagccaaagaaacttcaaactcttttaatcctaccaagggtgttgaaggtagtgaggattcaaattcaaagcgcagcaagccaaatgagggcgacggaaatgaaaatggccaagtgaaggttgaggaagagtccaaagcagaggaagagaaacagaacaaaagtaactcaaaacctcccgagccaccaaaagattacattcatgtgagagcaagaagaggccaagccactgacagccatagtcttgcagaacgtgtacggagggagaaaatcagtgagaggatgaagctgctccaagatcttgtaccaggttgcaataaggtcactggcaaggcacttatgctagatgaaattataaattatgttcagtcattgcagcgtcaagttgagttcctgtctatgaagttggcttctgttaacacaaggatggatcttagtattgagaatcttatttcaaaagatgtattccagtcaaacaattctttggcaacactcccaaatgcagtattcccattagattcctcagcacaaaccttttatgggcaccagcctcagcaaaacaacccagttgcccataataacatacctaacagatcggtgacccactgctcagtggacccattagatacttctttgtgccaaaaccttgccatgcagttaccacccctaaatgtgtttaatgatggtggctctcagtttccattagcattcttagaggacgatctccacaccattgttcagatggggtttggccaagcagctaacagaaaaacaccaatacaatccccgagtttcaacggttcaaataatgtaccacagatgaaagttgagctctga

SEQ ID NO: 290 - protein, 548 aa, Glycine max
MGIQLTVMNCAPEQTQDCFYNPNWDKSTADHGLHHFDSSALSSMVSSPAASSNPNNKSNENFIIRELVGKLGPIGSSDEIPQHSPHPLVVASSCMNSNGNNSTYTSCYSTPLSSPPKVNIVHSLVNERLANLGGGKSTMALNSSVAEFSADPGFAERAAKFSCFGSRSFNDRSVQLGVNNAELAQRSAPAMEHGGKLPRVSSSPLLKTLGSQMGAQENKNSAIHQEQEKMEGANSQEESTISEQAPNGEIGVKTSQDMMNSRKRKASSKGKAKETSNSFNPTKGVEGSEDSNSKRSKPNEGDGNENGQVKVEEESKAEEEKQNKSNSKPPEPPKDYIHVRARRGQATDSHSLAERVRREKISERMKLLQDLVPGCNKVTGKALMLDEIINYVQSLQRQVEFLSMKLASVNTRMDLSIENLISKDVFQSNNSLATLPNAVFPLDSSAQTFYGHQPQQNNPVAHNNIPNRSVTHCSVDPLDTSLCQNLAMQLPPLNVFNDGGSQFPLAFLEDDLHTIVQMGFGQAANRKTPIQSPSFNGSNNVPQMKVEL

SEQ ID NO: 291 - DNA, 1761 bp, Glycine max
atggaaaaccaattctttctcaatgctggtgtgccccctcagctgcattttgagccttctccacaccaccatcatcaccatctttgtccaccaccctcttggcaatcatcactgtcttctgccatggatgttcaagtcactgttttgaattgttcaactgagcagaacccggattgcttctacaacaacacccccacatgggacaagtcaacggatcatcatggtcttcagtttgattcagctctgagctcaatggtgtcctctcctgcagcctccaattccaacatgtcaagtgagaattttgtcatcagggaattgattggaaaattgggaaacattggtgctggctctgatgagattgagatctcacctcattctcagcctttggttggtgcatcttcctacatcaattgcaataacaacagcaccaacacatcatgttatagtacccctttgagttcttctccaaaggtgaacatgaacaagatccccacaatggtgaagcacttggtgaaagagggcatgcccctaagtttggggacatcaacgtccttgaattccaccgtggcggaattctcagctgatcctggctttgctgagagggctgcaaagctttcttgctttggaagtaggagtttcaatggcaggaccacccaattgtgcctcaacattgctgaattggctcagagatcttctccattggtggaaaatgggaagaagcagctccctagagtctcaagtagtccatcactcaaagtgcttggatctcaaatgggtactcaggagaacaagaattctccattgcaagacctaatggaagtggccaattctcaagaggagtccgcaatctctgaacaaacaccaaatggagacactggggagaaaccttccccttatgtgaattctaggaaaagaaaaggtccatccaaaggaaaagccaaagaaacttcaacctctaccaacccccctatggctgctgaagctagcgatgactcgaatgcaaagcgcagcaagcctaacgaaggtgaggggaatgaaaatggccaagtgaaggcagaggaagagtccaaaggaggtaataatagtaatgcaaatgatgagaaacagaacaagagtaactcaaaacctcctgagcctccaaaggattacattcatgttagagcaagaagaggtcaagccactgatagtcatagtcttgcagaaagagttcggagggagaaaatcagtgaaagaatgaagcttctccaagatcttgtcccaggttgcaacaaggtcacgggtaaagcactaatgcttgatgaaattataaactatgttcagtcattgcagcgccaagttgagtttctgtctatgaagttggcttctgttaacaccaggctggattttagtattgagagtctaatctcaaaagatatatttcaatcaaataattctttggcacagccaatattcccaatagattcctcggcgccacccttttatgggcaacaaactcagccaaacccagcaatccacaataacattcctaatggaactatgacccacaactcagtggacccattagatactggtatgtgccaaaaccttggcatgcatttaccacacctaaatggttttaatgaaggtggctttcagtatccaataacattctctgaagatgacctccacaccattgttcagatgggatttggccaaactgcaaataggaaaacaccaatacaatctcagagtttcaatggctcaaatcaagaacccctatga

SEQ ID NO: 292 - protein, 586 aa, Glycine max
MENQFFLNAGVPPQLHFEPSPHHHHHHLCPPPSWQSSLSSAMDVQVTVLNCSTEQNPDCFYNNTPTWDKSTDHHGLQFDSALSSMVSSPAASNSNMSSENFVIRELIGKLGNIGAGSDEIEISPHSQPLVGASSYINCNNNSTNTSCYSTPLSSSPKVNMNKIPTMVKHLVKEGMPLSLGTSTSLNSTVAEFSADPGFAERAAKLSCFGSRSFNGRTTQLCLNIAELAQRSSPLVENGKKQLPRVSSSPSLKVLGSQMGTQENKNSPLQDLMEVANSQEESAISEQTPNGDTGEKPSPYVNSRKRKGPSKGKAKETSTSTNPPMAAEASDDSNAKRSKPNEGEGNENGQVKAEEESKGGNNSNANDEKQNKSNSKPPEPPKDYIHVRARRGQATDSHSLAERVRREKISERMKLLQDLVPGCNKVTGKALMLDEIINYVQSLQRQVEFLSMKLASVNTRLDFSIESLISKDIFQSNNSLAQPIFPIDSSAPPFYGQQTQPNPAIHNNIPNGTMTHNSVDPLDTGMCQNLGMHLPHLNGFNEGGFQYPITFSEDDLHTIVQMGFGQTANRKTPIQSQSFNGSNQEPL

SEQ ID NO: 293 - DNA, 1497 bp, Medicago truncatula
atggaaaaccaattctttttaaatgctggatttgaaccttaccaaacccaagattgttttttcaacccaaattgggacaagtcaacggaccaaaaccttaactatgattcaacacttagttcaattgtctcatccccagcagctacatcatcaccatcaaatcccaacatgtccaatgaaaattttgtcatgagagaattaataggaaaattgggaacttttggtgagatctcacaacattcttctaaccctttggttctaccaatgatgtctagagtggcagaattttcacctgatcctggttttgttcaaagggctgcaaaattttcttgctttggtagcaagagtttcaatgaaagaggtaaccaaatggtgatgaacaatgttgaattagctcaaagatctcataatttaatggaaaatggaatgaagttatcaagagtttcaagtagtccatcactcaaaacatttggatctcaaatggttaatcatgagaacaagaattcttcattgcaacaagaaaatgagaaaatggaagtggctaattctcaagaagaatctacaatatctgagcaaaatacaccaaatggtgaaattggtgtcaaagcttcacctgatatgaattcaaggaaaagaaaagcttcttcttccaaaggaaaagcaccaaactctaccaatcctacgaagggtgttgaaggtagtggtgaagacttcaatgcaaagaaaattaaggcaaatgagggtgagagaaatgaaaatggtgtcaggaatatggaggaagagatcaaagaaggtacaccaaatgcaggggaagaaaaacagaacaagagtgactcaaaacctcctgaacctcaaaaagattacattcatgtcagagcaagaagaggtcaagctactgacagtcacagtcttgcagaacgagtaaggagggagaaaataagtgagaggatgaaacttctccaagatcttgtaccaggttgcaataaggttactggaaaagcacttatgcttgatgaaattataaattatgttcagtcattgcagcgtcaagttgagtttttgtctatgaaattgtcttcagtgaacacaaagatggatttaagtattgaaagtcttgttgtatcaaaagatatatttcaatcaaataattctttgcaaaactcaatattccaattagattcctcggtaccatccttttatgggcaacaaccccagcaaaaccaagctattcataataacatccctaatacaaatgggtcccactgctcagtggaaccattggattcttctttgtgccataatattggcatgcatttacctttcctaaatggatttaatgaaggtggctctcagcagtatccattaacattctctgaggaggacttaaacaccgttgttcagatgggatttggccaaacttcaaacaggaatacaccaatacactccccaagtttcaacggttcaaatcaatcaacacaaatgaaaattgagctctaa

SEQ ID NO: 294 - protein, 498 aa, Medicago truncatula
MENQFFLNAGFEPYQTQDCFFNPNWDKSTDQNLNYDSTLSSIVSSPAATSSPSNPNMSNENFVMRELIGKLGTFGEISQHSSNPLVLPMMSRVAEFSPDPGFVQRAAKFSCFGSKSFNERGNQMVMNNVELAQRSHNLMENGMKLSRVSSSPSLKTFGSQMVNHENKNSSLQQENEKMEVANSQEESTISEQNTPNGEIGVKASPDMNSRKRKASSSKGKAPNSTNPTKGVEGSGEDFNAKKIKANEGERNENGVRNMEEEIKEGTPNAGEEKQNKSDSKPPEPQKDYIHVRARRGQATDSHSLAERVRREKISERMKLLQDLVPGCNKVTGKALMLDEIINYVQSLQRQVEFLSMKLSSVNTKMDLSIESLVVSKDIFQSNNSLQNSIFQLDSSVPSFYGQQPQQNQAIHNNIPNTNGSHCSVEPLDSSLCHNIGMHLPFLNGFNEGGSQQYPLTFSEEDLNTVVQMGFGQTSNRNTPIHSPSFNGSNQSTQMKIEL

SEQ ID NO: 295 - DNA, 1188 bp, Oryza sativa
atggacggcggcagggtcgggggcgactacatttccagcctcctcagctcctccccccggctcgacttcggcgtgccggtgctggacgccgtcgtggcgccgggaggcggcggcggcggcggggactgcggcctcgacaagctctgcggcgacccggggttcgcggagcgcgccgcgcggctgtccagcttcaacaacggcggcggcggtgttgggcagcggtacggcggcgcgggggcggggctcttcgggatgcctcctccggctcccggcgacttcgccggaggtggctccagggaggcgtcctccgtgtccgaccccgcctcctcggcgatgaaggacgccgccgccaatgccaagaagaggaagtccacggcggcggcggccgccgccgccaagggcaaaggcaaggagcctccggttggggaagagaaggaatcagatggcaagaggtgcaagacgggcaatggcgagaaggagagctcggtgaagccgaaggcggagcaggccgggagcgacagctccgtcgaggacggcagcggtggcgggcagaagcaagggaaggggaagaatgccaagccggtggagccacccaaggactatgtccatgtccgggcgaggcgaggccaagccactgacagccacagcctcgctgagagggtcagaagagagaggatcagccagaggatgaaggttctccaggacctggttccaggatgcaacaaggtaattggcaaggcactcatgcttgatgagatcataaactacgtgcaatcgcttcaacggcaagttgagttcctgtccatgaagctagcaactgtgaatccacttgatttcagtaacctgcctactctgctgcagaaagatatgttccaagcatgtggcccttcagcaagctcggttttctcattagaaagctccaattctgcttttccgtttgccgaacaaggagatgttttccaacagtttgctcaaaacagcatggaaagccagtgcaccctgaatcagttggacctggctctatctcaggctacaaatgctgcacagtatgcttttcaggatggaacagccggcgcaaacttgcagcaaaggaacttctgggaggatgatctccaaagtgttttccatattgagaatggacagagccaggagaatggggtttcagcaccaaacttccatggttggtaa

SEQ ID NO: 296 - protein, 395 aa, Oryza sativa
MDGGRVGGDYISSLLSSSPRLDFGVPVLDAVVAPGGGGGGGDCGLDKLCGDPGFAERAARLSSFNNGGGGVGQRYGGAGAGLFGMPPPAPGDFAGGGSREASSVSDPASSAMKDAAANAKKRKSTAAAAAAAKGKGKEPPVGEEKESDGKRCKTGNGEKESSVKPKAEQAGSDSSVEDGSGGGQKQGKGKNAKPVEPPKDYVHVRARRGQATDSHSLAERVRRERISQRMKVLQDLVPGCNKVIGKALMLDEIINYVQSLQRQVEFLSMKLATVNPLDFSNLPTLLQKDMFQACGPSASSVFSLESSNSAFPFAEQGDVFQQFAQNSMESQCTLNQLDLALSQATNAAQYAFQDGTAGANLQQRNFWEDDLQSVFHIENGQSQENGVSAPNFHGW

SEQ ID NO: 297 - DNA, 1101 bp, Oryza sativa
atggacagcgactacgttgccggcattctcatgagcgccgccgccgcggggctcgacctcggtgtgctcgacggcggcggtggcgctttcttggagacgctgtgcggcgggcccggcttcgcggagcgggcggcgaggttgtgcggcggcggagctgggctgttcgggctgcctgcggtggggaacgccgagcgcggcggctgctcgagggaaggctcgtcggtgtccgaccctgcgtgggcgcacgccaccggcggcggcggcgacaatgccaggaagaggaaagctccggcgagcgccgccgccgggaaggacaaggacgccgtcgtgggcggcggcagcagcccgtgcgaggttggagaggcgaaggcgccggactccaagaaatgcaaagcggaggtgaatcccaaggtggaagaagccgccagcgatggctcggtgggagacagagtgcagaagcaaggaaaggggaagaactcatccaagccggccgccgagccgcccaaggactacgtccatgtccgggcacggcgaggtcaggccactgacagccacagccttgcagagagggttagaagagagaagattagccagcggatgaaagtgcttcaggacctggtgcctggatgcaacaaggtggttggcaaggcactcatgcttgatgagatcataaactacgtgcaatcgttgcagcagcaggtcgagttcctgtccatgaagctcgcgaccgtgaatccgcagctcgactttggcaacctatctacactcttacagaaagatatgttccaatcttgtggcccttcggtgaattccgtatttcctttggaaagtgccggtacagcttttccattttgtgaccaagcagattttttccagtcatttggtctgggagccatggaaaaccaatgtagcctagatctggcaaacacagctctaccccacacagggagcacacagtatgcttttcagaagcagcaaagggatctctgggaggataatactttccagtataacgacgaacaaagccaggaggatgcggtttctgcaccgaatttcgatggtcagttgcaagcagcagatcacacagagatcgagttctag

SEQ ID NO: 298 - protein, 366 aa, Oryza sativa
MDSDYVAGILMSAAAAGLDLGVLDGGGGAFLETLCGGPGFAERAARLCGGGAGLFGLPAVGNAERGGCSREGSSVSDPAWAHATGGGGDNARKRKAPASAAAGKDKDAVVGGGSSPCEVGEAKAPDSKKCKAEVNPKVEEAASDGSVGDRVQKQGKGKNSSKPAAEPPKDYVHVRARRGQATDSHSLAERVRREKISQRMKVLQDLVPGCNKVVGKALMLDEIINYVQSLQQQVEFLSMKLATVNPQLDFGNLSTLLQKDMFQSCGPSVNSVFPLESAGTAFPFCDQADFFQSFGLGAMENQCSLDLANTALPHTGSTQYAFQKQQRDLWEDNTFQYNDEQSQEDAVSAPNFDGQLQAADHTEIEF

SEQ ID NO: 299 - DNA, 1455 bp, Oryza sativa
atgaactgcgggccgcccgaccagttgccgccggcgacggcgccgtcgtgcttcctcaacctcaactgggaccagtccatggacgcggcggcgggagggcacctcgacccggcgctcagctccatggtgtcctcgccggcgtccaactcgacgggcgctctccacgggatctcgccgcagccgcactacggtggcgggacgccgctcagctcgccccccaagctcaacctgtccatgatggggcagttccaccactacgccgcgccgccgcaggtgggcggcggcggaggcggaggcgggggcctgccaatcctcgagaacctgatgcccatgggccacctcgaccagttcctcgccgaccctggcttcgccgagcgcgccgcgaggctctccggcttcgacgcccgcggcggcggcggaggaggaggctacggcggcgccggcccggcgcaattcggcctccctgacgccggcgcggccggcgcatcgaaggagatggagctcgggaacacccgggacgagtcgtcggtgtctgatccggcgcccggcggcgccgagattccgcccaagggggcttccgacggcaatgcacggaagcggaaggcctccgggaagggcaaaggcaaggacagccccatgtccacctccgccgccaaggaggattccagcggcaagcgttgcaaatcgacggaggagagcaatgcggccgccgaggagaattccggcaaggggaaggccgcgcagagcaacagcgagaatggcggcggcaagaagcaagggaaggacagctcgtcgaagccccccgagccgcccaaggactacatccatgtccgcgcccggcgcggcgaggcgacggacagccacagcctcgccgagagggtgagaagagagaagataagccagaggatgaagctgctgcaggatctcgtgccgggttgtaacaaggtggttggaaaggctgtcatgctcgatgaaatcataaactatgtgcagtcgttgcaacggcaagtcgagtttttgtccatgaagttggccactgtgaatccccagctggacttcaacaatttgcctaacctccttgctaaagatatgcaccagtcatgcagcccgttacagagctcacattttccactagagacctcaggtgcgccgctgccctacattaaccagcctcagcaagggaaccctctcggttgtggcctgacgaacggcatggacaaccagggttctatgcacccattggacccggcattttgccggccaatgggctcgcaccatcctttcctcaatggggttagcgatgcggcttctcaggttggtgctttctggcaagatgatctccaaagtgttgttcagatggatatggggcaaagtcaggagatcgccacctcttccaatagctacaatggtaggatcgttgcaaacagtccacatgaaaatggagctttgacatga

SEQ ID NO: 300 - protein, 484 aa, Oryza sativa
MNCGPPDQLPPATAPSCFLNLNWDQSMDAAAGGHLDPALSSMVSSPASNSTGALHGISPQPHYGGGTPLSSPPKLNLSMMGQFHHYAAPPQVGGGGGGGGGLPILENLMPMGHLDQFLADPGFAERAARLSGFDARGGGGGGGYGGAGPAQFGLPDAGAAGASKEMELGNTRDESSVSDPAPGGAEIPPKGASDGNARKRKASGKGKGKDSPMSTSAAKEDSSGKRCKSTEESNAAAEENSGKGKAAQSNSENGGGKKQGKDSSSKPPEPPKDYIHVRARRGEATDSHSLAERVRREKISQRMKLLQDLVPGCNKVVGKAVMLDEIINYVQSLQRQVEFLSMKLATVNPQLDFNNLPNLLAKDMHQSCSPLQSSHFPLETSGAPLPYINQPQQGNPLGCGLTNGMDNQGSMHPLDPAFCRPMGSHHPFLNGVSDAASQVGAFWQDDLQSVVQMDMGQSQEIATSSNSYNGRIVANSPHENGALT

SEQ ID NO: 301 - DNA, 1197 bp, Oryza sativa
atggacagcgactacgttgccggccttctcatgagcgccgccgccgcggggctcgacctcggtgtgctcgacggcggcggtggcgctttcttggagacgctgtgcggcgggcccggcttcgcggagcgggcggcgaggttgtgcggcggcggagctgggctcttcgggctgcctgcggtggggaacgccgagcgcggcggctgctcgagggaaggctcgtcggtgtccgaccctgcgtgggcgcacgccaccggcggcggcggcgacaatgccaggaagaggaaagctccggcgagcgccgccgccgggaaggacaaggacgccgtcgtgggcggcggcagcagcccgtgcgaggttggagaggcgaaggcgccggactccaagaaatgcaaagcggaggtgaatcccaaggtggaagaagccgccagcgatggctcggtgggagacagagtgcagaagcaaggaaaggggaagaactcatccaagccggccgccgagccgcccaaggactacgtccatgtccgggcacggcgaggtcaggccactgacagccacagccttgcagagagggttagaagagagaagattagccagcggatgaaagtgcttcaggacctggtgcctggatgcaacaaggtggttggcaaggcactcatgcttgatgagatcataaactacgtgcaatcgttgcagcagcaggtcgagttcctgtccatgaagctcgcgaccgtgaatccgcagctcgactttggcaacctatctacactcttacagaaagatatgttccaatcttgtggcccttcggtgaattccgtatttcctttggaaagtgccggtacagcttttccattttgtgaccaagcagattttttccagtcatttggtctgggagccatggaaaaccaatgtagcctagatctggcaaacacagctctaccccacacagggagcacacagtatgcttttcagaagcaggtgattgctgccttaaaaaacttgcaatctacggaacagatggtattaacatgcatatatgatgataacactgtttgcctttggttttcttttcagcaaagggatctctgggaggataatactttccagtataacgacgaacaaagccaggaggatgcggtttctgcaccgaatttcgatggtcagttgcaagcagcagatcacacagagatcgagttctag

SEQ ID NO: 302 - protein, 398 aa, Oryza sativa
MDSDYVAGLLMSAAAAGLDLGVLDGGGGAFLETLCGGPGFAERAARLCGGGAGLFGLPAVGNAERGGCSREGSSVSDPAWAHATGGGGDNARKRKAPASAAAGKDKDAVVGGGSSPCEVGEAKAPDSKKCKAEVNPKVEEAASDGSVGDRVQKQGKGKNSSKPAAEPPKDYVHVRARRGQATDSHSLAERVRREKISQRMKVLQDLVPGCNKVVGKALMLDEIINYVQSLQQQVEFLSMKLATVNPQLDFGNLSTLLQKDMFQSCGPSVNSVFPLESAGTAFPFCDQADFFQSFGLGAMENQCSLDLANTALPHTGSTQYAFQKQVIAALKNLQSTEQMVLTCIYDDNTVCLWFSFQQRDLWEDNTFQYNDEQSQEDAVSAPNFDGQLQAADHTEIEF

SEQ ID NO: 303 - DNA, 1170 bp, Oryza sativa
atggacagcgactacgttgccggccttctcatgagcgccgccgccgcggggctcgacctcggtgtgctcgacggcggcggtggcgctttcttggagacgctgtgcggcgggcccggcttcgcggagcgggcggcgaggttgtgcggcggcggagctgggctcttcgggctgcctgcggtggggaacgccgagcgcggcggctgctcgagggaaggctcgtcggtgtccgaccctgcgtgggcgcacgccaccggcggcggcggcgacaatgccaggaagaggaaagctccggcgagcgccgccgccgggaaggacaaggacgccgtcgtgggcggcggcagcagcccgtgcgaggttggagaggcgaaggcgccggactccaagaaatgcaaagcggaggtgaatcccaaggtggaagaagccgccagcgatggctcggtgggagacagagtgcagaagcaaggaaaggggaagaactcatccaagccggccgccgagccgcccaaggactacgtccatgtccgggcacggcgaggtcaggccactgacagccacagccttgcagagagggttagaagagagaagattagccagcggatgaaagtgcttcaggacctggtgcctggatgcaacaaggtggttggcaaggcactcatgcttgatgagatcataaactacgtgcaatcgttgcagcagcaggtcgagttcctgtccatgaagctcgcgaccgtgaatccgcagctcgactttggcaacctatctacactcttacagaaagatatgttccaatcttgtggcccttcggtgaattccgtatttcctttggaaagtgccggtacagcttttccattttgtgaccaagcagattttttccagtcatttggtctgggagccatggaaaaccaatgtagcctagatctggcaaacacagctctaccccacacagggagcacacagtatgcttttcagaagcaggtgattgctgccttaaaaaacttgcaatctacggaacagatggtattaacatgcatatatgatgataacactgtttgcctttggttttcttttcagcaaagggatctctgggaggataatactttccagtataacgacgaacaaagccaggaggatgcggtttctgcaccgaatttcgatggttcgtgtaattga

SEQ ID NO: 304 - protein, 389 aa, Oryza sativa
MDSDYVAGLLMSAAAAGLDLGVLDGGGGAFLETLCGGPGFAERAARLCGGGAGLFGLPAVGNAERGGCSREGSSVSDPAWAHATGGGGDNARKRKAPASAAAGKDKDAVVGGGSSPCEVGEAKAPDSKKCKAEVNPKVEEAASDGSVGDRVQKQGKGKNSSKPAAEPPKDYVHVRARRGQATDSHSLAERVRREKISQRMKVLQDLVPGCNKVVGKALMLDEIINYVQSLQQQVEFLSMKLATVNPQLDFGNLSTLLQKDMFQSCGPSVNSVFPLESAGTAFPFCDQADFFQSFGLGAMENQCSLDLANTALPHTGSTQYAFQKQVIAALKNLQSTEQMVLTCIYDDNTVCLWFSFQQRDLWEDNTFQYNDEQSQEDAVSAPNFDGSCN

SEQ ID NO: 305 - DNA, 1107 bp, Oryza sativa
atggacagcgactacgttgccggccttctcatgagcgccgccgccgcggggctcgacctcggtgtgctcgacggcggcggtggcgctttcttggagacgctgtgcggcgggcccggcttcgcggagcgggcggcgaggttgtgcggcggcggagctgggctcttcgggctgcctgcggtggggaacgccgagcgcggcggctgctcgagggaaggctcgtcggtgtccgaccctgcgtgggcgcacgccaccggcggcggcggcgacaatgccaggaagaggaaagctccggcgagcgccgccgccgggaaggacaaggacgccgtcgtgggcggcggcagcagcccgtgcgaggttggagaggcgaaggcgccggactccaagaaatgcaaagcggaggtgaatcccaaggtggaagaagccgccagcgatggctcggtgggagacagagtgcagaagcaaggaaaggggaagaactcatccaagccggccgccgagccgcccaaggactacgtccatgtccgggcacggcgaggtcaggccactgacagccacagccttgcagagagggttagaagagagaagattagccagcggatgaaagtgcttcaggacctggtgcctggatgcaacaaggtggttggcaaggcactcatgcttgatgagatcataaactacgtgcaatcgttgcagcagcaggtcgagttcctgtccatgaagctcgcgaccgtgaatccgcagctcgactttggcaacctatctacactcttacagaaagatatgttccaatcttgtggcccttcggtgaattccgtatttcctttggaaagtgccggtacagcttttccattttgtgaccaagcagattttttccagtcatttggtctgggagccatggaaaaccaatgtagcctagatctggcaaacacagctctaccccacacagggagcacacagtatgcttttcagaagcagcaaagggatctctgggaggataatactttccagtataacgacgaacaaagccaggaggatgcggtttctgcaccgaatttcgatgttgcaagcagcagatcacacagagatcgagttctagatgatcaatga

SEQ ID NO: 306 - protein, 368 aa, Oryza sativa
MDSDYVAGLLMSAAAAGLDLGVLDGGGGAFLETLCGGPGFAERAARLCGGGAGLFGLPAVGNAERGGCSREGSSVSDPAWAHATGGGGDNARKRKAPASAAAGKDKDAVVGGGSSPCEVGEAKAPDSKKCKAEVNPKVEEAASDGSVGDRVQKQGKGKNSSKPAAEPPKDYVHVRARRGQATDSHSLAERVRREKISQRMKVLQDLVPGCNKVVGKALMLDEIINYVQSLQQQVEFLSMKLATVNPQLDFGNLSTLLQKDMFQSCGPSVNSVFPLESAGTAFPFCDQADFFQSFGLGAMENQCSLDLANTALPHTGSTQYAFQKQQRDLWEDNTFQYNDEQSQEDAVSAPNFDVASSRSHRDRVLDDQ

SEQ ID NO: 307 - DNA, 1101 bp, Oryza sativa
atggacagcgactacgttgccggccttctcatgagcgccgccgccgcggggctcgacctcggtgtgctcgacggcggcggtggcgctttcttggagacgctgtgcggcgggcccggcttcgcggagcgggcggcgaggttgtgcggcggcggagctgggctcttcgggctgcctgcggtggggaacgccgagcgcggcggctgctcgagggaaggctcgtcggtgtccgaccctgcgtgggcgcacgccaccggcggcggcggcgacaatgccaggaagaggaaagctccggcgagcgccgccgccgggaaggacaaggacgccgtcgtgggcggcggcagcagcccgtgcgaggttggagaggcgaaggcgccggactccaagaaatgcaaagcggaggtgaatcccaaggtggaagaagccgccagcgatggctcggtgggagacagagtgcagaagcaaggaaaggggaagaactcatccaagccggccgccgagccgcccaaggactacgtccatgtccgggcacggcgaggtcaggccactgacagccacagccttgcagagagggttagaagagagaagattagccagcggatgaaagtgcttcaggacctggtgcctggatgcaacaaggtggttggcaaggcactcatgcttgatgagatcataaactacgtgcaatcgttgcagcagcaggtcgagttcctgtccatgaagctcgcgaccgtgaatccgcagctcgactttggcaacctatctacactcttacagaaagatatgttccaatcttgtggcccttcggtgaattccgtatttcctttggaaagtgccggtacagcttttccattttgtgaccaagcagattttttccagtcatttggtctgggagccatggaaaaccaatgtagcctagatctggcaaacacagctctaccccacacagggagcacacagtatgcttttcagaagcagcaaagggatctctgggaggataatactttccagtataacgacgaacaaagccaggaggatgcggtttctgcaccgaatttcgatggtcagttgcaagcagcagatcacacagagatcgagttctag

SEQ ID NO: 308 - protein, 366 aa, Oryza sativa
MDSDYVAGLLMSAAAAGLDLGVLDGGGGAFLETLCGGPGFAERAARLCGGGAGLFGLPAVGNAERGGCSREGSSVSDPAWAHATGGGGDNARKRKAPASAAAGKDKDAVVGGGSSPCEVGEAKAPDSKKCKAEVNPKVEEAASDGSVGDRVQKQGKGKNSSKPAAEPPKDYVHVRARRGQATDSHSLAERVRREKISQRMKVLQDLVPGCNKVVGKALMLDEIINYVQSLQQQVEFLSMKLATVNPQLDFGNLSTLLQKDMFQSCGPSVNSVFPLESAGTAFPFCDQADFFQSFGLGAMENQCSLDLANTALPHTGSTQYAFQKQQRDLWEDNTFQYNDEQSQEDAVSAPNFDGQLQAADHTEIEF

SEQ ID NO: 309 - DNA, 1446 bp, Oryza sativa
atgaactgcgggccgcccgaccagttgccgccggcgacggcgccgtcgtgcttcctcaacctcaactgggaccagtccatggacgcggcggcgggagggcacctcgacccggcgctcagctccatggtgtcctcgccggcgtccaactcgacgggcgctctccacgggatctcgccgcagccgcactacggtggcgggacgccgctcagctcgccccccaagctcaacctgtccatgatggggcagttccaccactacgccgcgccgccgcaggtgggcggcggcggaggcggaggcgggggcctgccaatcctcgagaacctgatgcccatgggccacctcgaccagttcctcgccgaccctggcttcgccgagcgcgccgcgaggctctccggcttcgacgcccgcggcggcggcggaggaggaggctacggcggcgccggcccggcgcaattcggcctccctgacgccggcgcggccggcgcatcgaaggagatggagctcgggaacacccgggacgagtcgtcggtgtctgatccggcgcccggcggcgccgagattccgcccaagggggcttccgacggcaatgcacggaagcggaaggcctccgggaagggcaaaggcaaggacagccccatgtccacctccgccgccaaggaggattccagcggcaagcgttgcaaatcgacggaggagagcaatgcggccgccgaggagaattccggcaaggggaaggccgcgcagagcaacagcgagaatggcggcggcaagaagcaagggaaggacagctcgtcgaagccccccgagccgcccaaggactacatccatgtccgcgcccggcgcggcgaggcgacggacagccacagcctcgccgagagggtgagaagagagaagataagccagaggatgaagctgctgcaggatctcgtgccgggttgtaacaaggtggttggaaaggctgtcatgctcgatgaaatcataaactatgtgcagtcgttgcaacggcaagtcgagtttttgtccatgaagttggccactgtgaatccccagctggacttcaacaatttgcctaacctccttgctaaagatatgcaccagtcatgcagcccgttacagagctcacattttccactagagacctcaggtgcgccgctgccctacattaaccagcctcagcaagggaaccctctcggttgtggcctgacgaacggcatggacaaccagggttctatgcacccattggacccggcattttgccggccaatgggctcgcaccatcctttcctcaatggggttagcgatgcggcttctcaggttggtgctttctggcaagatgatctccaaagtgttgttcagatggatatggggcaaagtcaggagatcgccacctcttccaatagctacaatggatcgttgcaaacagtccacatgaaaatggagctttga

SEQ ID NO: 310 - protein, 481 aa, Oryza sativa
MNCGPPDQLPPATAPSCFLNLNWDQSMDAAAGGHLDPALSSMVSSPASNSTGALHGISPQPHYGGGTPLSSPPKLNLSMMGQFHHYAAPPQVGGGGGGGGGLPILENLMPMGHLDQFLADPGFAERAARLSGFDARGGGGGGGYGGAGPAQFGLPDAGAAGASKEMELGNTRDESSVSDPAPGGAEIPPKGASDGNARKRKASGKGKGKDSPMSTSAAKEDSSGKRCKSTEESNAAAEENSGKGKAAQSNSENGGGKKQGKDSSSKPPEPPKDYIHVRARRGEATDSHSLAERVRREKISQRMKLLQDLVPGCNKVVGKAVMLDEIINYVQSLQRQVEFLSMKLATVNPQLDFNNLPNLLAKDMHQSCSPLQSSHFPLETSGAPLPYINQPQQGNPLGCGLTNGMDNQGSMHPLDPAFCRPMGSHHPFLNGVSDAASQVGAFWQDDLQSVVQMDMGQSQEIATSSNSYNGSLQTVHMKMEL

SEQ ID NO: 311 - DNA, 1218 bp, Oryza sativa
atggacggcggcagggtcgggggcgactacatttccagcctcctcagctcctccccccggctcgacttcggcgtgccggtgctggacgccatcgtggcgccgggaggcggcggcggcggcggcgactgcggcctcgacaagctctgcggcgacccggggttcgcggagcgcgccgcgcggctgtccagcttcaacaacggcggcggcggtgttgggcagcggtacggcggcgcgggggcggggctcttcgggatgcctcctccggctcccggcgacttcgccggaggtggctccagggaggcgtcctccgtgtccgaccccgcctcctcggcgatgaaggacgccgccgccaatgccaagaagaggaagtccacggcggcggcggccgccgccgccaagggcaaaggcaaggagcctccggttggggaagagaaggaatcagatggcaagaggtgcaagacgggcaatggcgagaaggagagctcggtgaagccgaaggcggagcaggccgggagcgacagctccgtcgaggacggcggcggtggcgggcagaagcaagggaaggggaagaatgccaagccggtggagccacccaaggactatgtccatgtccgggcgaggcgaggccaagccactgacagccacagcctcgctgagagggtcagaagagagaggatcagccagaggatgaaggttctccaggacctggttccaggatgcaacaaggtaattggcaaggcactcatgcttgatgagatcataaactacgtgcaatcgcttcaacggcaagttgagttcctgtccatgaagctagcaactgtgaatccacttgatttcagtaacctgcctactctgctgcagaaagatatgttccaagcatgcggcccttcagcgagctcggttttctcattagaaagctccaattctgcttttcggtttgccgaacaaggagatgttttccaacagtttgctcaaaacagcatggaaagccagtgcaccctgaatcagttggacctggctctatctcaggctacaaatgctgcacagtatgcttttcaagatggaacagccggcgcaaacttgcagcaaaggaacttctgggaggatgatctccaaagtgttttccatattgagaatggacagagccaggagaatggggtttcagcaccaaacttccatggtcagcagcaagcaggccacatgaaaatggagttctaa

SEQ ID NO: 312 - protein, 405 aa, Oryza sativa
MDGGRVGGDYISSLLSSSPRLDFGVPVLDAIVAPGGGGGGGDCGLDKLCGDPGFAERAARLSSFNNGGGGVGQRYGGAGAGLFGMPPPAPGDFAGGGSREASSVSDPASSAMKDAAANAKKRKSTAAAAAAAKGKGKEPPVGEEKESDGKRCKTGNGEKESSVKPKAEQAGSDSSVEDGGGGGQKQGKGKNAKPVEPPKDYVHVRARRGQATDSHSLAERVRRERISQRMKVLQDLVPGCNKVIGKALMLDEIINYVQSLQRQVEFLSMKLATVNPLDFSNLPTLLQKDMFQACGPSASSVFSLESSNSAFRFAEQGDVFQQFAQNSMESQCTLNQLDLALSQATNAAQYAFQDGTAGANLQQRNFWEDDLQSVFHIENGQSQENGVSAPNFHGQQQAGHMKMEF

SEQ ID NO: 313 - DNA, 1101 bp, Oryza sativa; identical to SEQ ID NO: 307

SEQ ID NO: 314 - protein, 366 aa, Oryza sativa; identical to SEQ ID NO: 308

SEQ ID NO: 315 - DNA, 1101 bp, Oryza sativa
atggacagcgactacgttgccggccttctcatgagcgccgccgccgcggggctcgacctcggtgtgctcgacggcggcggtggcgctttcttggagacgctgtgcggcgggcccggcttcgcggagcgggcggcgaggttgtgcggcggcggagctgggctcttcgggctgcctgcggtggggaacgccgagcccttaggatgctcgagggaaggctcgtcggtgtccgaccctgcgtgggcgcacgccaccggcggcggcggcgacaatgccaggaagaggaaagctccggcgagcgccgccgccgggaaggacaaggacgccgtcgtgggcggcggcagcagcccgtgcgaggttggagaggcgaaggcgccggactccaagaaatgcaaagcggaggtgaatcccaaggtggaagaagccgccagcgatggctcggtgggagacagagtgcagaagcaaggaaaggggaagaactcatccaagccggccgccgagccgcccaaggactacgtccatgtccgggcacggcgaggtcaggccactgacagccacagccttgcagagagggttagaagagagaagattagccagcggatgaaagtgcttcaggacctggtgcctggatgcaacaaggtggttggcaaggcactcatgcttgatgagatcataaactacgtgcaatcgttgcagcagcaggtcgagttcctgtccatgaagctcgcgaccgtgaatccgcagctcgactttggcaacctatctacactcttacagaaagatatgttccaatcttgtggcccttcggtgaattccgtatttcctttggaaagtgccggtacagcttttccattttgtgaccaagcagattttttccagtcatttggtctgggagccatggaaaaccaatgtagcctagatctggcaaacacagctctaccccacacagggagcacacagtatgcttttcagaagcagcaaagggatctctgggaggataatactttccagtataacgacgaacaaagccaggaggatgcggtttctgcaccgaatttcgatggtcagttgcaagcagcagatcacacagagatcgagttctag

SEQ ID NO: 316 - protein, 366 aa, Oryza sativa
MDSDYVAGLLMSAAAAGLDLGVLDGGGGAFLETLCGGPGFAERAARLCGGGAGLFGLPAVGNAEPLGCSREGSSVSDPAWAHATGGGGDNARKRKAPASAAAGKDKDAVVGGGSSPCEVGEAKAPDSKKCKAEVNPKVEEAASDGSVGDRVQKQGKGKNSSKPAAEPPKDYVHVRARRGQATDSHSLAERVRREKISQRMKVLQDLVPGCNKVVGKALMLDEIINYVQSLQQQVEFLSMKLATVNPQLDFGNLSTLLQKDMFQSCGPSVNSVFPLESAGTAFPFCDQADFFQSFGLGAMENQCSLDLANTALPHTGSTQYAFQKQQRDLWEDNTFQYNDEQSQEDAVSAPNFDGQLQAADHTEIEF

SEQ ID NO: 317 - DNA, 1971 bp, Physcomitrella patens
atggcattcatgtctccagcccctgaccaagcgacggtattcggcgggctggtgaagaagagcatgagcatcccctcgtcgttcaataccgcggccatgtcgccaacggactccatgaactctctgtatagcttggagaagcaattggtgggccagccaaggagcaacgccgcgctcagtggcgtgccgggagtgagtgggttctccaggtcggccaccaactactggggccacgcaacgtccacggacatgcagcaaatcctcggggattcggcgtctgtgtccccgcaggaggcgctgggatctgggatggtgagtagcgactggcaacagttgctggatgcaaaatcgtcggcatacaagtatccgccgggggtgtcggcagctgcaactccagcgcgcggggggatcatggagaatgctaggattagagaaatgttgacaggtagggtggggggaagtccagtccctcacaagtcgtggagccccttggacacggttgcggcggggattgcagtggaccagtcgaagggcggcctggcactacatggagtggatctcgcgacttcgcattgcctggcccagttcacatcggatcctgccttcgctgagcgtgcggcgaaattttctagttttggtaatgggaaatacccacagatcgcgttgtcgttgcctgtgaacgacgcgcattgtaagccgcggtcgcgatccagcgagagtggttgtaagtcttctagaactacgtgcaacccaaattcggcgaagaagtcgactgcgacggtcgcggctgggatggaagagaacactgccgccgctccagctgctgcctcagttctggcagctcctgcagcggcggatagatcatgtgacatggatgtggacggtgttggtaacaacgacaagagcccgactcgcactgcgagtgtgcctgagttggaagccattgagggagcaagcttggtcaccatggatagaacccatgagctggccgaagtagcagcagggctggagcctaacaattccagttctgtaacagaacaacagcaagcgagcgctgcgtcgcctgcgagatcacctacaggaagcgatgacagcgatcggcgtaaacggaagagttcttccgctgataagctcgacgtagattctaaggctgcagatgttgcggactcccaaccaaagcggtgcaaaggtgacaacgacgatctagtgaaggcaaaggcggaacgtagtagcagtgaaaactctggcgactccggaagccccagagctcacaaggagaacaattcaagcaaggaccatgcaaagcaggactacatacacgtgcgagctcgacgggggcaagccaccgacagccacagccttgccgagagggttcgcagagagaagatcagcgagaggatgaagtacctgcaggacctggttcccggctgcagtaaagtaaccggcaaggcggtgatgcttgacgagatcatcaactacgtgcagtcgctccagcgccaagtcgagaacctgtcaatgaagttagcttcagtcaaccctgggccatcctctactcgcatagaccataacttcgagaccaccatgaacaaagacatgctgcagtctcagatgtctggctctctcggtggatcggaatcgaccaccacgtttggcatgatgcagcagcatcagcatcaaccacagcctcaaggacacatgatgaatggccactgtggcttggattttcgagcgatggggacttcgatggatgggtacctccggcgctctaatagcgcccccatcagagtccagtctggaatcactagtttagactcattcggggacgatgtctctcagtcaattggatgggatggggagcttcaaagcatcgtgaaccagatgggttttagcttccaaggtcgctatggatcttctcctctcgatagtcttcaatgtcaactaccagtcggtcatatgaaggtggagatgtga

SEQ ID NO: 318 - protein, 656 aa, Physcomitrella patens
MAFMSPAPDQATVFGGLVKKSMSIPSSFNTAAMSPTDSMNSLYSLEKQLVGQPRSNAALSGVPGVSGFSRSATNYWGHATSTDMQQILGDSASVSPQEALGSGMVSSDWQQLLDAKSSAYKYPPGVSAAATPARGGIMENARIREMLTGRVGGSPVPHKSWSPLDTVAAGIAVDQSKGGLALHGVDLATSHCLAQFTSDPAFAERAAKFSSFGNGKYPQIALSLPVNDAHCKPRSRSSESGCKSSRTTCNPNSAKKSTATVAAGMEENTAAAPAAASVLAAPAAADRSCDMDVDGVGNNDKSPTRTASVPELEAIEGASLVTMDRTHELAEVAAGLEPNNSSSVTEQQQASAASPARSPTGSDDSDRRKRKSSSADKLDVDSKAADVADSQPKRCKGDNDDLVKAKAERSSSENSGDSGSPRAHKENNSSKDHAKQDYIHVRARRGQATDSHSLAERVRREKISERMKYLQDLVPGCSKVTGKAVMLDEIINYVQSLQRQVENLSMKLASVNPGPSSTRIDHNFETTMNKDMLQSQMSGSLGGSESTTTFGMMQQHQHQPQPQGHMMNGHCGLDFRAMGTSMDGYLRRSNSAPIRVQSGITSLDSFGDDVSQSIGWDGELQSIVNQMGFSFQGRYGSSPLDSLQCQLPVGHMKVEM

SEQ ID NO: 319 - DNA, 1704 bp, Prunus persica
atgggaaaagacagaacagccacaccctcttggaacccttcgagttttggcatggaaatgcagtccaatgagctcaattgtggctcacagcagctccccaattctctttttaatgccaattgggacaattcaatggatcagagcgatccctttgagtctgccttgagctccattgtttcttctccggcggcgtccaacgccgccatcgctgcgggcaaaggcggcggcgatggagaaatgattagagaactaattggaagattaggaagcatttgcaattcaggagaaatatcttcacactcttacatgtgtggcaataacagcactaacacttcatgttatagcaccccattgaactcttcacctaagctgaacctgtcaatgattgatccacagatgagaggcaatttgccaattcctggaaatcatttaccttcacatccaagtttggcaccttttcaagctgaccctggatttgttgagagggctgcaaggttttcctgctttggtggtggcaattttggtggcctcaatgggcaggtcaacttgaatgaagctgaattggcttatagatcaatgccaaaaattgattctggcaagctttccagagcttccagcaaccaatcacttaaagttgctgctggatctcaattgggtgttcaagaaagcaacaaaagctctccccagggtgggaattcagctcctgataagaaattcggcaggttttcgaggtcctccaccccagaaaatgctgaattaggtgattcaagggaaggatcatcagtttctgagcagatcccaggtggggatatgagtgtgaaagcagaaaatgtgaccaattccaggaaaaggaaacctgttgcaagaggaaaagccaaagaaacctcttcatctccctctgttaaagatggcaaggttgtggcagaaaaagaggaaccaaattccaagagaagcaaaacagatgaagcttctgggaacgaaaaggcagctgcaaaggcaaagatagagcccagtggaggttccaaagctacaggggatggggctcaaaagcaaacaaaggataattcagagcctcctgaggctccaaaggactatattcatgtcagagccagaaggggtcaagctactgatagccatagtcttgcagaaagagttcgaagagagaaaattagcgaaaggatgaaatttcttcaagatcttgttcctggttgcaacaaggtaactggaaaagcagtgatgctagatgaaattataaattatgtacagtcattgcagcgccaagttgagtttctttcaatgaaattgtcaactgtaaatcccagaatggatttgaacatggaggctcttctgtcaaaggagattcttcaatctcgtgggtctttacaaaatgccctttaccaattagattctgcaataccttcattccctttcgggtaccagccgcagcaactgccacctttgcatagcagcagcatctctagtgggacagagacacaatttccagagagccctctaaatgctgcaatgcgtcaaagtcaaggcatgcagttacccacatttgatagatttggtggagcagcacctcaagctccacaattctttgaggatgaccttcaaagtgtggttcagatgggatttggccagattcagcaggagagccttcatggttcaatggcttcagcccagatgaaagttgagctataa

SEQ ID NO: 320 - protein, 567 aa, Prunus persica
MGKDRTATPSWNPSSFGMEMQSNELNCGSQQLPNSLFNANWDNSMDQSDPFESALSSIVSSPAASNAAIAAGKGGGDGEMIRELIGRLGSICNSGEISSHSYMCGNNSTNTSCYSTPLNSSPKLNLSMIDPQMRGNLPIPGNHLPSHPSLAPFQADPGFVERAARFSCFGGGNFGGLNGQVNLNEAELAYRSMPKIDSGKLSRASSNQSLKVAAGSQLGVQESNKSSPQGGNSAPDKKFGRFSRSSTPENAELGDSREGSSVSEQIPGGDMSVKAENVTNSRKRKPVARGKAKETSSSPSVKDGKVVAEKEEPNSKRSKTDEASGNEKAAAKAKIEPSGGSKATGDGAQKQTKDNSEPPEAPKDYIHVRARRGQATDSHSLAERVRREKISERMKFLQDLVPGCNKVTGKAVMLDEIINYVQSLQRQVEFLSMKLSTVNPRMDLNMEALLSKEILQSRGSLQNALYQLDSAIPSFPFGYQPQQLPPLHSSSISSGTETQFPESPLNAAMRQSQGMQLPTFDRFGGAAPQAPQFFEDDLQSVVQMGFGQIQQESLHGSMASAQMKVEL

SEQ ID NO: 321 - DNA, 1692 bp, Populus trichocarpa
atggagagtgagtactttttcaatgcaggagtccctccacaagcattgctctttgaaccaacctcaacctcttcatcgatgccagtttggcaatccctctcatctcccatggaaatgcaagataattgctcagcccgccgcttgttcaattccaactgggaaaagtcaacggatcacagtcctcactttgagtcttccctgagctcaatggtgtcctctccaggagtatcaaactgtaacgtgtccagtgagagctttatggtcagagaactgataggaaatctaggaaacattgacaacagcaacaaccctggtgagatctcaccgcattctcagccaatgttggcagcttcatatattacagctgccaataacagtgccaacacctcatgctatactactcctttgaattcaccacccaagctgaatatgcctgtcatggatcaattttcgaaagagcatttgaatatccccagtttgggaaaaccaatgggtttgaattccagtgtggcagaattcacagctgatccgggatttgccgagagagctgcaaagttctcttgctttggcagcaggagtttcaatggcagaatcagccagttggggctaaacaatgctgaaatggctaatggatgtaatccattgatgggaaatggcaagttggcgcgtgttgcgagtagtcctttactcaaggcagtgggatctcaaaagggtaacaagagtactccattgcaggatcgatccgaattgacaaattctcaggagtcctctgtatctgaacaaattccaagtggggaggcaggtttaaaggcctccaatgagttaaattccaggaaaagaaaagcactttccaagggaaaagcaaaacaatcagcatcaaacccaccagccagtgctacgaaggatgcagaaactgatgataattcaaacacgaaaagaatcaagccaaatgaaggagaagagaatgaaaatagtcctgttaaagcagaggaagagccaaagggcagcggagatgatatccaaaacaaggccaattcaaggcctcctgagcctcctaaggactacattcatgttagagcaaggaggggtcaagcaactgatagccatagccttgctgaaagagttcgaagagagaaaatcagtgaacgaatgaagcttctccaagatcttgtgcctggttgcaataaggtcacaggaaaagcccttatgcttgatgaaatcataaattacgtgcagtcattgcaacggcaagttgagttcctctctatgaagttggcttctgtgaataccaggctggattttaacatggacactctcatttcaaaagatattttccaatcaagccaaccattgccccatccaatatttccattagattcctcggcaccggcagcaatatttagccaccaacagcagcaaaatccaccactgcatagcaatatttctaatggggcagtgacccactgctctgtggacccattagataccactggactgtgccaaaccctcaatgctcagttacccccgcttgatggatttacccaaaatgctcatcagtatccaacattctgtgaagatgacctgcagaccattgttcagatgggttatggccagaatccaaacctggaaacatttctgccacaaaatttccatggttcaaatcaagtatcccacatgaaaatcgagctctaa

SEQ ID NO: 322 - protein, 563 aa, Populus trichocarpa
MESEYFFNAGVPPQALLFEPTSTSSSMPVWQSLSSPMEMQDNCSARRLFNSNWEKSTDHSPHFESSLSSMVSSPGVSNCNVSSESFMVRELIGNLGNIDNSNNPGEISPHSQPMLAASYITAANNSANTSCYTTPLNSPPKLNMPVMDQFSKEHLNIPSLGKPMGLNSSVAEFTADPGFAERAAKFSCFGSRSFNGRISQLGLNNAEMANGCNPLMGNGKLARVASSPLLKAVGSQKGNKSTPLQDRSELTNSQESSVSEQIPSGEAGLKASNELNSRKRKALSKGKAKQSASNPPASATKDAETDDNSNTKRIKPNEGEENENSPVKAEEEPKGSGDDIQNKANSRPPEPPKDYIHVRARRGQATDSHSLAERVRREKISERMKLLQDLVPGCNKVTGKALMLDEIINYVQSLQRQVEFLSMKLASVNTRLDFNMDTLISKDIFQSSQPLPHPIFPLDSSAPAAIFSHQQQQNPPLHSNISNGAVTHCSVDPLDTTGLCQTLNAQLPPLDGFTQNAHQYPTFCEDDLQTIVQMGYGQNPNLETFLPQNFHGSNQVSHMKIEL

SEQ ID NO: 323 - DNA, 1689 bp, Populus trichocarpa
atggatatgagtgacaaggataaatttgagttaggaaagagcaatgataatcctatcaactaccattcacccggtggcctgtcctcagactggcgatttaacagtaccagtatcccaaactcatctctgggtttggttcccattgataatcagatgtcagtttgtagaggagatctagtaggtgctgcttcttgctcttctgcttctgtgatagactcatttgggccagccatgtgggaacatcccaccaattcacagaacttggttttttgtgatattaatgttcaaaatattgcaagcagttcaaacacagtagggattggaaaaggagcccccgcttcattgagaaatggtattgatagaacactagaaatggggtggaatccacctaattcaatgctgaaaggtggaaatttcttgccgaatgcccctgggatgctcccacagagcttatcacagtttcctgctgattctgcattcattgagcgtgctgccaggttttcgtgcttcaatggaggggattttggtgatatggtgaacccttttggagttcctgagtctatgggtcttttttcgaggggtggggggatgatgcagggaccaggagaggtgtttgtgggcagtgggatgaaatcagtatctggtggacaagctcaaaagaatgttatgaacgccggtgaagcttccaaagatgtttctatgtctgttgaccatatggctactgaagggagccctctcaagaatgagacaaaaagagaaagccttgcaagatctcgtgatgaagcaaaaaaaggtgtaggggggtctggtaatgactctgacgaagctgaattcagtggtggtagtggtcaagatgagccatcattgttggagggcaactgtggggagctttcagctaagagccttggctcaaagaaaagaaaaaggagtggagaggatgctgagcttgatcaggccaagggaacccctcaatctgcaaagggtagccctgaaactcaacagaagggagaccaaaaaccaacttcaactaccagcaaggctagtggtaaacaaggtaaacaggggtctcagggttcagatcaaccaaaagaagaatatattcatgtcagagctcgaagaggccaggcaacaaatagccatagtcttgcggaaagagtaagaagggaaaagatcagcgaaaggatgaagtttctacaggaccttgttcctggctgcagcaaggtcacagggaaggcagtgatgctagatgaaatcattaactatgtgcaatcactgcagcggcaggttgagtttctatcaatgaaacttgcaacggtgaatccaaggctggattttaacatagaaggactcctcgcaaaagatatccttcagtcacgtgctgttcctccatcctctctggcattttcctcagaaatgccgatggcttatcctgcattacatcaatctcaaccagggcttattcccactgcttttcctggaatggagagtcactctgacataatccggagaactattaattctcaattgacagccatgactgcaggattcaaggaacctgctcagctacccaatgtatgggatgatgagctccacaatgttgtccagatgacctatggaaccagtgctccccaagacagccaagatgtaaatgagccattgccaccaggacatttgaaagttgaactttaa

SEQ ID NO: 324 - protein, 562 aa, Populus trichocarpa
MDMSDKDKFELGKSNDNPINYHSPGGLSSDWRFNSTSIPNSSLGLVPIDNQMSVCRGDLVGAASCSSASVIDSFGPAMWEHPTNSQNLVFCDINVQNIASSSNTVGIGKGAPASLRNGIDRTLEMGWNPPNSMLKGGNFLPNAPGMLPQSLSQFPADSAFIERAARFSCFNGGDFGDMVNPFGVPESMGLFSRGGGMMQGPGEVFVGSGMKSVSGGQAQKNVMNAGEASKDVSMSVDHMATEGSPLKNETKRESLARSRDEAKKGVGGSGNDSDEAEFSGGSGQDEPSLLEGNCGELSAKSLGSKKRKRSGEDAELDQAKGTPQSAKGSPETQQKGDQKPTSTTSKASGKQGKQGSQGSDQPKEEYIHVRARRGQATNSHSLAERVRREKISERMKFLQDLVPGCSKVTGKAVMLDEIINYVQSLQRQVEFLSMKLATVNPRLDFNIEGLLAKDILQSRAVPPSSLAFSSEMPMAYPALHQSQPGLIPTAFPGMESHSDIIRRTINSQLTAMTAGFKEPAQLPNVWDDELHNVVQMTYGTSAPQDSQDVNEPLPPGHLKVEL

SEQ ID NO: 325 - DNA, 1707 bp, Populus trichocarpa
atggaaagagataagttgtttgtgagcgagggagccaacacagcagcaaccatttggaattcttgcagttttggaatggaaatgcaagccaatgagctgagttgcggtccagagaaacttgccaattgctttctcaatcccaattgggacaactcattggatcagagcgatccctttgagtctgctttgagctccattgtctcatcacctgttgcatccggtgccaacgcaaacgccaacgccattcctaatgctggcgttggtggtgacagtcttatgattagagaacttattggaagactaggaaacatttgcaattctggagacatttcactacaatcttttgttaacaataataacaatagcactaacacttcttgctatagtaccccaatgaattcccctccaaagctgaatctctcgatgatggattcacaaatgagaggaaacctgccaattcctggaaacagcgtagtaaagcatccaggtttagcaccatttccagctgattttgtagagagggctgcacgatattcttgctttggtagcaacaatcctggaggcatcaataaacaattcggattgaatgaatccgaattgattaataggttgatgccacgagtagaacctggtaagctctcgagagtttcgagtaacaattcaatgaaggtcactgtatcgcaagcaaatgttcaagaaagcaacaagagctcaccccaggatgggagtttgaattctgaaaagaaattcagtaggcagtcaaggcctacaacatcagagaatggagattccagggaagaatcttcattgtctgagcaggtcccaggtgggaaattgagcatgaaatcccagaatgacgccaattccaggaaaagaaaatcaattcccagaggaaaagccaaagaaactccctcttcatctccatctgcttctgatgtcaaggttgcagcagagaatgatgaatcgaaggcaaaaagaagcaaatcggatgaaactaatggcagtgacaaggatacagcaaaggaaaaggaagaagaaaatggaaatcagaaacagaacaaaaataattcaaagccgccagagccaccaaaggattatatccatgtcagagccagaaggggtcaggctacagatagccacagtcttgctgaaagagttagaagagagaaaatcagtgaaagaatgaagttcctccaggatcttgttcccggatgcaataaggttactgggaaagcagtgatgcttgacgagattataaactatgtacagtcattgcagcgccaggttgagtttctgtcaatgaagttgtcatctgtgaatccgaggatggagatcaacatggaaactttgttgtccaaggatattttccaatcccgtggatctatgccacatagtctttatccattagatgcctccacgccggtattcccttatggttaccaatcccagcaagggttagccctgcaaaatggcatgccaagcaatgccgaaacccagttctctatgaacccattaaatgctgcgttgcggcgaaacccgagcatgcatttgccacaccttgatggtttcggtgatcctgctgctcttcaggcctcagccatgtgggaagacgaccttcaaagtgttgtgcagatgggatatggtcagaatcatcaggagagctttcaaggctcagtgccctcaactcacatgaaaattgagctataa

SEQ ID NO: 326 - protein, 568 aa, Populus trichocarpa
MERDKLFVSEGANTAATIWNSCSFGMEMQANELSCGPEKLANCFLNPNWDNSLDQSDPFESALSSIVSSPVASGANANANAIPNAGVGGDSLMIRELIGRLGNICNSGDISLQSFVNNNNNSTNTSCYSTPMNSPPKLNLSMMDSQMRGNLPIPGNSVVKHPGLAPFPADFVERAARYSCFGSNNPGGINKQFGLNESELINRLMPRVEPGKLSRVSSNNSMKVTVSQANVQESNKSSPQDGSLNSEKKFSRQSRPTTSENGDSREESSLSEQVPGGKLSMKSQNDANSRKRKSIPRGKAKETPSSSPSASDVKVAAENDESKAKRSKSDETNGSDKDTAKEKEEENGNQKQNKNNSKPPEPPKDYIHVRARRGQATDSHSLAERVRREKISERMKFLQDLVPGCNKVTGKAVMLDEIINYVQSLQRQVEFLSMKLSSVNPRMEINMETLLSKDIFQSRGSMPHSLYPLDASTPVFPYGYQSQQGLALQNGMPSNAETQFSMNPLNAALRRNPSMHLPHLDGFGDPAALQASAMWEDDLQSVVQMGYGQNHQESFQGSVPSTHMKIEL

SEQ ID NO: 327 - DNA, 1194 bp, Sorghum bicolor
atggagggcagcagagccggcgccggcgactacattgccagcctgctgagctcgtcgccgaggctcgacttcggcgtgctcggcgccgccgacggcggcggggaggaggaggactgcctggacaagttctgcggcgacccggggttcgcggcgcgcgcggcgcggctgtccagcttcagcgcgcagcgcttccccggcgccgcgagcctcttcggcctgcccccgccggtgcccgccgcgagcggcggcggcgagttcgctggctcccgggaggcgtcgtcggtgtcggacccggcgtccgcgatgatgaaggacgccaatgccaagaagcggaaggcgcccccggcggccaaaggcaaaggcaaggagtcctctgttcaggcaggggagcagaaggatccagacaccaagaggtgcaagacggagggaggcgaggggaaggagggaagccccgtgaagcccaagccggagcaggccgggagcgacagctccgtcgaggacggtgggcagacccagaagccgccgggcaaggggaagaatgcgaagctggtggagccccccaaggactacgtccatgtccgggccaggagagggcaggctaccgacagccacagcctcgcagagagggtgagaagagagaggatcagccagaggatgaaggttcttcaggacctggtgccaggatgcaacaaggtgattggcaaggcactgatgcttgacgagatcataaactacgtgcaatcgctgcaacgacaagtcgagttcctctccatgaagcttgcaaccgtgaacccacttgacttcagcaacctgcctaccctcctacaaaaagatatgttccaagcctgtggcccttcagcaagctcagtcttctcgctggaaagctccagctcagggtttccgttcagcgaccatggagatgtgttccagtcgttcgttccaaacggcttggagaaccagtgcggcctgaatccgttggacctggctctgtctcatgccaccactgggcagtatggttttcaggacggaacagccggcacaacaaacctgcagcaaagaagctactgggaggaggacctgcaaagcgttttccacatcgacaataacgggcaaagccaggagaacggggtttcagtttcagcacagagctttcacggccagttacaagaaggccacatgaaaatggagttctga

SEQ ID NO: 328 - protein, 397 aa, Sorghum bicolor
MEGSRAGAGDYIASLLSSSPRLDFGVLGAADGGGEEEDCLDKFCGDPGFAARAARLSSFSAQRFPGAASLFGLPPPVPAASGGGEFAGSREASSVSDPASAMMKDANAKKRKAPPAAKGKGKESSVQAGEQKDPDTKRCKTEGGEGKEGSPVKPKPEQAGSDSSVEDGGQTQKPPGKGKNAKLVEPPKDYVHVRARRGQATDSHSLAERVRRERISQRMKVLQDLVPGCNKVIGKALMLDEIINYVQSLQRQVEFLSMKLATVNPLDFSNLPTLLQKDMFQACGPSASSVFSLESSSSGFPFSDHGDVFQSFVPNGLENQCGLNPLDLALSHATTGQYGFQDGTAGTTNLQQRSYWEEDLQSVFHIDNNGQSQENGVSVSAQSFHGQLQEGHMKMEF

SEQ ID NO: 329 - DNA, 1566 bp, Vitis vinifera
atggatatgagtgacaaggataaatttgagctagaaaagaggagtggtgattctttgaactaccattcagctagtatgtcatcggactggcgtttcggtggcgtctgcaaaggggatctagttggctcttcttcatgttcctcggcttccatggtagactcatttggcccaaacctctgggaccatcctgccaattcacaaaccttaggcttttgtgacatgaatgtccagaacaatgcaagcacatcaagcacactaggaattagaaaagggggtccaggttctttgagaatggatattgataaaacacttgacattggttggaatccaccgagttcgatgctgaaagggggtatcttcttaccgaatgcccctggaatgctccctcagggcttgtcacagtttcccgctgattctggtttcattgagcgagcagcgaggttctcatgcttcaatggaggtaattttagcgatatgatgaacccttttagcattcctgaatctttgaatccttattctagaggtgggggaatgctgcaacaagatgtttttgcaagcaatgggttgaaatcagtacctggagggcaatctcaaaaggatgagccaagcatggctgaaatttcaaaagatgtttcttcggctagaaaaagtgagagcttagtgaaatctcttgaagaagcaaaacaaggaattggggtgtctggtaatgaatctgacgaagccgagttcagtggaggcggtggtgaaccttcttctggcaagggccttggctcgaagaaaaggaaaagaagtggtcaggacccagagattgatcaagtcaagggaagcccacagcaacccggagaagcttcaaaggataaccctgaaattcaacataagggagaccaaaacccaagttcagttcccagtaagaacactggaaaacacggtaagcagggggcacaagcttcagatccaccaaaggaagaatatattcatgtcagagcacggagaggtcaggcaacaaacagccatagtcttgcagaaagagtaagaagggaaaagatcagtgaaaggatgaagtttcttcaagacctggtacctggttgcagcaaggtcactggcaaggcggtcatgctagatgaaatcattaactatgtgcaatcacttcaacggcaggttgagtttttgtcaatgaaacttgctaccgttaatccgcggctggattttaatattgaaggcatgcttggaaaagatatccttcaatcaagagtaggtccttcatctacaatgggtttttcgccagaaacaactatgccttatcctcagctacatccatctcaaccaggattgattcaagtaggtcttcctggcttggggaactcttctgatgcaattaggagaactattaattcccaattggcggccatgagtggagggtacaaggagtcagcaccccagctacctaatgtatgggaggatgaactccacaatgttgttcaaatgggctttagtactggtgctcccctcaacagccaagatttaaatgggtctctaccacctggccatatgaaagctgaactttaa

SEQ ID NO: 330 - protein, 521 aa, Vitis vinifera
MDMSDKDKFELEKRSGDSLNYHSASMSSDWRFGGVCKGDLVGSSSCSSASMVDSFGPNLWDHPANSQTLGFCDMNVQNNASTSSTLGIRKGGPGSLRMDIDKTLDIGWNPPSSMLKGGIFLPNAPGMLPQGLSQFPADSGFIERAARFSCFNGGNFSDMMNPFSIPESLNPYSRGGGMLQQDVFASNGLKSVPGGQSQKDEPSMAEISKDVSSARKSESLVKSLEEAKQGIGVSGNESDEAEFSGGGGEPSSGKGLGSKKRKRSGQDPEIDQVKGSPQQPGEASKDNPEIQHKGDQNPSSVPSKNTGKHGKQGAQASDPPKEEYIHVRARRGQATNSHSLAERVRREKISERMKFLQDLVPGCSKVTGKAVMLDEIINYVQSLQRQVEFLSMKLATVNPRLDFNIEGMLGKDILQSRVGPSSTMGFSPETTMPYPQLHPSQPGLIQVGLPGLGNSSDAIRRTINSQLAAMSGGYKESAPQLPNVWEDELHNVVQMGFSTGAPLNSQDLNGSLPPGHMKAEL

SEQ ID NO: 331 - DNA, 1557 bp, Vitis vinifera
atggaaaaggagaggttgttcatgaatgaaggcaactgcatcactccacccaactggaatttaggtatggaaattcaatccaatgagctgaattgctcctcccaagcggttcaaaattgtttcctgaatcccaattgggacaactcaatggatcagagcgatccctttgagtccgccttgagctccattgtgtcttctccggttgggtccagtgcgggaggcatgccaggggatagcattgccatcagagaattgattggaagactggggagcatatgcaattccggggagatttcgcctcagtcttacattggaggaggcggccacggcaacaccaacaacagtaacaacacttcttgctataacacgccattgaattctcctcccaagctcaatctctccatcatggatcatcagcaacatcagatcaggaccaatttccccactaatcatttaccaacacatccaagtctggcaccctttccagctgatcccggattcgccgagagggctgcgagattttcctgctttggcactgggaatttctcaggcctaagtgcccaattcggcctcaatgatactgaactgccatatagatcatctactggtaagctctccagagtctccagtaaccagtccttcaaggctgctggatctcaactgggtcgccgccccaggatggagtttcagcttctgataagaaattgggtaaaatttcaaggtcttctaccccagataatacagaattgggagattcccgcgaggaatcttcggtttctgagcagatcccaggccagaatgatgccaatggaagaaaaagaaaatcgattcccagaggcaaagccaaggaagtcccttcatccccctctgccaaagatgcgaaggttgcctcagacaaggatgaatcgaatgccaagagaagcaaaccagatgaagaggcaaatgggagactacatccatgttagagccagaaggggtcaagctactgatagccatagtcttgctgaaagagtccgaagagagaaaatcagtgagagaatgaagttccttcaagatcttgtaccgggctgcaataaggtgactgggaaagcagttatgctggacgaaattataaactatgtgcaatccttgcagcgtcaggttgagtttctctctatgaagttggcaactgtgaatccaaggatggatttcaacatggaagctcttctgtccaaggaaatctttcaatcgcggggatcattgccacaagccatgtacccattggattcctcagctctagcatttccctacggataccagccccaacaaggaccatctctacagaatgggattcctaatggaacagagacccccttctcggtgaaccctttaaattctgcgatacgacgcacctcaagcatgctgccttccattgatgggtttggtgaagctgcctctcaggtttctacgttttgggaggacgaactccatagcgttgttcagatgggaataggccagaatcagccccagggctttcctgggtcaatgggtgcagcccagatgaaaattgagttatga

SEQ ID NO: 332 - protein, 518 aa, Vitis vinifera
MEKERLFMNEGNCITPPNWNLGMEIQSNELNCSSQAVQNCFLNPNWDNSMDQSDPFESALSSIVSSPVGSSAGGMPGDSIAIRELIGRLGSICNSGEISPQSYIGGGGHGNTNNSNNTSCYNTPLNSPPKLNLSIMDHQQHQIRTNFPTNHLPTHPSLAPFPADPGFAERAARFSCFGTGNFSGLSAQFGLNDTELPYRSSTGKLSRVSSNQSFKAAGSQLGRRPRMEFQLLIRNWVKFQGLLPQIIQNWEIPARNLRFLSRSQARMMPMEEKENRFPEAKPRKSLHPPLPKMRRLPQTRMNRMPREANQMKRQMGDYIHVRARRGQATDSHSLAERVRREKISERMKFLQDLVPGCNKVTGKAVMLDEIINYVQSLQRQVEFLSMKLATVNPRMDFNMEALLSKEIFQSRGSLPQAMYPLDSSALAFPYGYQPQQGPSLQNGIPNGTETPFSVNPLNSAIRRTSSMLPSIDGFGEAASQVSTFWEDELHSVVQMGIGQNQPQGFPGSMGAAQMKIEL

SEQ ID NO: 333 - DNA, 1215 bp, Zea mays
atgaaagagggcagacccggcgccggcgactacattgccagcctgctaagctcgtcgccgaggctcgacttcggcggggaggaggaggaggactgcctggacaggttctgcggcgacccggggttcgcggctcgcgcggcgcggctgtccagcttcagcgggcagcgcttcgccgtcaccgcgggcctcttcgggctgcccccgccgctgcccgccgcgagcggcggcggcgagttcgccgggtcccgggaggcgtcgtcggtgtcggacccggcgtcggcgatgaaggacgccaatgccaagaagcggaaggcgcccgcggcggcggcggccaagggcaaaggcagggagccatctgcgcaggcacaggcaggggagccgaagggtccggacgccaagaggtgctgcaaggcggagggaggcgagggggaggaggggagccccgtgaagctgcccaagccggagcaggccggcagcgacagctccgtcgaggacggcggcgcgcagaaccagaagccgccgccgccggtgaagggaaagaatgccaagccggtggagcctcccagggactacgtccatgtccgggccaggagagggcaggctaccgacagccacagcctcgcagagagggtgagaagggagaggatcagccagaggatgaaggtccttcaggacctggtgccaggatgcaacaaggtgatcggcaaggcgctgatgctcgacgagatcataaactacgtgcagtcgctgcaacggcaggtcgagttcctctccatgaagctcgcaaccgtcaacccactggacctgagcaacctgcccacgctcctacaaaaagatatgttccaggcctgcggcgcttcggcgagctcggtcttctcgctggagagctgcagcccggggttcccgttcggcgggcaaggggacgtgttccagtccttcgtcccgaacggcctggagaacccgtgcggcggcctgaacccgctggacctggctctgtcccaggctaccggcgggcagttcggtttccaggacggaacggccggcacaaacctgcagcaaaggaactactgggaggaggaggaggaggacctgcagagcgtgttccacatcgacgacaacgggcagagccaggagcacggggcctcagcttcagcacaaagcttccatggtcagcttcaaccacaagagggccacatgaagatggagttcttctga

SEQ ID NO: 334 - protein, 404 aa, Zea mays
MKEGRPGAGDYIASLLSSSPRLDFGGEEEEDCLDRFCGDPGFAARAARLSSFSGQRFAVTAGLFGLPPPLPAASGGGEFAGSREASSVSDPASAMKDANAKKRKAPAAAAAKGKGREPSAQAQAGEPKGPDAKRCCKAEGGEGEEGSPVKLPKPEQAGSDSSVEDGGAQNQKPPPPVKGKNAKPVEPPRDYVHVRARRGQATDSHSLAERVRRERISQRMKVLQDLVPGCNKVIGKALMLDEIINYVQSLQRQVEFLSMKLATVNPLDLSNLPTLLQKDMFQACGASASSVFSLESCSPGFPFGGQGDVFQSFVPNGLENPCGGLNPLDLALSQATGGQFGFQDGTAGTNLQQRNYWEEEEEDLQSVFHIDDNGQSQEHGASASAQSFHGQLQPQEGHMKMEFF

SEQ ID NO: 335 - DNA, 1212 bp, Zea mays
atgaaagagggcagacccggcgccggcgactacattgccagcctgctaagctcgtcgccgaggctcgacttcggcggggaggaggaggaggactgcctggacaggttctgcggcgacccggggttcgcggctcgcgcggcgcggctgtccagcttcagcgggcagcgcttcgccgtcaccgcgggcctcttcgggctgcccccgccgctgcccgccgcgagcggcggcggcgagttcgccgggtcccgggaggcgtcgtcggtgtcggacccggcgtcggcgatgaaggacgccaatgccaagaagcggaaggcgcccgcggcggcggcggccaagggcaaaggcagggagccatctgcgcaggcacaggcaggggagccgaagggtccggacgccaagaggtgctgcaaggcggagggaggcgagggggaggaggggagccccgtgaagctgcccaagccggagcaggccggcagcgacagctccgtcgaggacggcggcgcgcagaaccagaagccgccgccgccggtgaagggaaagaatgccaagccggtggagcctcccagggactacgtccatgtccgggccaggagagggcaggctaccgacagccacagcctcgcagagagggtgagaagggagaggatcagccagaggatgaaggtccttcaggacctggtgccaggatgcaacaaggtgatcggcaaggcgctgatgctcgacgagatcataaactacgtgcagtcgctgcaacggcaggtcgagttcctctccatgaagctcgcaaccgtcaacccactggacctgagcaacctgcccacgctcctacaaaaagatgtaagcgcctgcggcgcttcggcgagctcggtcttctcgctggagagctgcagcccggggttcccgttcggcgggcaaggggacgtgttccagtccttcgtcccgaacggcctggagaacccgtgcggcggcctgaacccgctggacctggctctgtcccaggctaccggcgggcagttcggtttccaggacggaacggccggcacaaacctgcagcaaaggaactactgggaggaggaggaggaggacctgcagagcgtgttccacatcgacgacaacgggcagagccaggagcacggggcctcagcttcagcacaaagcttccatggtcagcttcaaccacaagagggccacatgaagatggagttcttctga

SEQ ID NO: 336 - protein, 403 aa, Zea mays
MKEGRPGAGDYIASLLSSSPRLDFGGEEEEDCLDRFCGDPGFAARAARLSSFSGQRFAVTAGLFGLPPPLPAASGGGEFAGSREASSVSDPASAMKDANAKKRKAPAAAAAKGKGREPSAQAQAGEPKGPDAKRCCKAEGGEGEEGSPVKLPKPEQAGSDSSVEDGGAQNQKPPPPVKGKNAKPVEPPRDYVHVRARRGQATDSHSLAERVRRERISQRMKVLQDLVPGCNKVIGKALMLDEIINYVQSLQRQVEFLSMKLATVNPLDLSNLPTLLQKDVSACGASASSVFSLESCSPGFPFGGQGDVFQSFVPNGLENPCGGLNPLDLALSQATGGQFGFQDGTAGTNLQQRNYWEEEEEDLQSVFHIDDNGQSQEHGASASAQSFHGQLQPQEGHMKMEFF

SEQ ID NO: 337 - DNA, 1260 bp, Aquilegia formosa x Aquilegia pubescens
atgctacactgcgcagcagataccatgactgttttagaaagacaacaagctcggcaaaaatggcaacaagtcccactactacaacaacaacaacaacaacagcagcatcaacaaagctattttagtgatacccatttcaatttattaccaaattcttcttcttcttcacaacaatttcatattatgatgaatgatgattcagtgattagagattttgtgaatcgttcaattaaattggacccaagtttggataataatgggtggcaggattttgggaaatacccagtttctggaaatggatttggtgttaatggagttgatttggttgattattcactttctagaacatctagttgtccaccggcagatgtggtggtggaagcaaaaggtggtgaagttgtggtggcggagaagttaggtggtaaagttgggaaagaaagctttaagaagagaaaagcacagaactcaaaggttgtagcagaggaagttattagagacaagagaatgaaaggggattcagaagaagagtctaaagttactgaagtgaataacagcaacagcagtactagcaataataacaacaaagaaacttctggggattcagtgaaagagaattcaaaggcatctggagcacaaaaacaagattacattcatgttcgagcacgtcgtgggcaagctaccgacagtcatagcttagctgaaagagtaagaagagaaaagattagtgagagaatgaaatatcttcaagatttagttccaggatgtaacaagatcactggcaaggctggaatgttagatgaaatcattaattatgttcaatcactacaaagacaagtcgagttcttgtcaatgaagcttgctgctgttaatcctagacttgactttaacatcgagaatttattcgcaaaagagatgttttcggctaacactgctggttttccaatcgggacatcatcagaaatggccaatccctcagcctaccttcctcttaattcattacaacaaatgatctcaaattgtggtttggatatggggatgaattcttctgatatctcacttcaaagaacacgaagtgcaccagtgtcagatgcattcctagatacctcttgcttcactcaagcccaaccctcttcttctgcctgggagactgatttgcagagcctttacaatgtggaattcaatcaaactagaccagttacatttccacctcaatcatttacaggcattttggaagctaacaacctcaagatggagatgtga

SEQ ID NO: 338 - protein, 419 aa, Aquilegia formosa x Aquilegia pubescens
MLHCAADTMTVLERQQARQKWQQVPLLQQQQQQQQHQQSYFSDTHFNLLPNSSSSSQQFHIMMNDDSVIRDFVNRSIKLDPSLDNNGWQDFGKYPVSGNGFGVNGVDLVDYSLSRTSSCPPADVVVEAKGGEVVVAEKLGGKVGKESFKKRKAQNSKVVAEEVIRDKRMKGDSEEESKVTEVNNSNSSTSNNNNKETSGDSVKENSKASGAQKQDYIHVRARRGQATDSHSLAERVRREKISERMKYLQDLVPGCNKITGKAGMLDEIINYVQSLQRQVEFLSMKLAAVNPRLDFNIENLFAKEMFSANTAGFPIGTSSEMANPSAYLPLNSLQQMISNCGLDMGMNSSDISLQRTRSAPVSDAFLDTSCFTQAQPSSSAWETDLQSLYNVEFNQTRPVTFPPQSFTGILEANNLKMEM

SEQ ID NO: 339 - DNA, 909 bp, Aquilegia formosa x Aquilegia pubescens
atgtctagcaatgaatctggtgaaggtgaattcagcggtggtggccaaggagaacactctattccggaaaatgatggtggtgagccttcctcgtcgaagggcattagcacaaagaaaaggaagagggctgctcagaatgctgaaattgatcaagataagggagcttcacaacactctggtgaggctaaggctgatgataagtctaaagagaagggtggtcagaatattaattcagcgaccaataagtctgctggtaaacatggtaaagatgtctctcaagctttggatgcccctaaagaagattatatccatattcgagcaagaagaggccaggctacaaacagccatagtcttgcagaaagggttcgaagggaaaaaatcagtgaaaggatgaaatttcttcaagagcttgttccgggttgcagcaaggtcactggcaaggctgtcatgcttgatgagatcattaattatgtgcaatcactgcaacgacaggttgagttcttgtccatgaagctagcaactgttaatccacgactagacttcaacattgaagggatccttggaaaagatgtccttcagtcacgaagtggtccatcgacattaggattttcgcctgatatgagtatggtccatccccagatgcatccatctcaacaggctttactccaaacaggaatacccggtgttggaaactcgtcagatgcacttcgtagaaccattaattctcaattggcagccttgaacagtggatacaaagatcttatgcctcagaaccatcaacagattgcgactgggtgggatgacgaactccacaatgttgtacagatgggctttggcaccaatggccctttcaacaatcaagatttaaatggtcctctgccaccaggccatatgaaagttgagctttaa

SEQ ID NO: 340 - protein, 302 aa, Aquilegia formosa x Aquilegia pubescens
MSSNESGEGEFSGGGQGEHSIPENDGGEPSSSKGISTKKRKRAAQNAEIDQDKGASQHSGEAKADDKSKEKGGQNINSATNKSAGKHGKDVSQALDAPKEDYIHIRARRGQATNSHSLAERVRREKISERMKFLQELVPGCSKVTGKAVMLDEIINYVQSLQRQVEFLSMKLATVNPRLDFNIEGILGKDVLQSRSGPSTLGFSPDMSMVHPQMHPSQQALLQTGIPGVGNSSDALRRTINSQLAALNSGYKDLMPQNHQQIATGWDDELHNVVQMGFGTNGPFNNQDLNGPLPPGHMKVEL

SEQ ID NO: 341 - DNA, 1116 bp, Arabidopsis thaliana
atgaacatggacaaggaaacagagcaaaccctaaattacttacctttgggtcagagcgatccctttggcaatggcaatgaaggaacaattggagatttccttggaagatactgcaacaaccctcaggagatttcaccgttaactctacaatccttctctctgaattctcagatctccgagaatttcccaatctctggtggaatcagattccctccatatccaggtcaatttggatccgatcgtgaatttgggtcacaaccaacaacgcaggagagtaacaagagctctttgttggatccagattcagtttcggatcgagttcacaccacgaaatctaactctagaaagaggaagtcgattcctagtggtaatggcaaggagtctccagcttcatcgtctcttacagcttccaattcaaaggtttcaggagagaatggtggatctaaaggtgggaagagaagcaagcaagatgtagctgggagtagtaaaaacggagtagagaagtgcgatagtaaaggcgacaataaggacgatgctaagcctcctgaggcgcctaaagattatattcatgtcagagctagaaggggtcaagcaactgatagccatagtcttgctgaaagagcaagaagagaaaagattagtgagagaatgacgttgcttcaggatctggttcctggttgcaaccggattacagggaaagcagtcatgcttgatgaaattataaattatgtgcagtccttgcagagacaagttgagttcttgtccatgaagctggctaccgtaaatccaaggatggagtttaatgctaatgcttctttatccacagagatgattcaaccgggggagtcgttaacgcagtctctttacgcaatggcttgctcagagcaaagacttccatcagcatactattcacttggcaagaacatgccaagattctcagacacacaattcccctcaaacgatggatttgttcacactgagacaccaggattctgggaaaataatgacctgcaaagcattgttcagatgggttttggagatatcctccagcaacagagcaacaacaacaacaacaactgttctgagccaacgcttcagatgaagcttgaaccatag

SEQ ID NO: 342 - protein, 371 aa, Arabidopsis thaliana
MNMDKETEQTLNYLPLGQSDPFGNGNEGTIGDFLGRYCNNPQEISPLTLQSFSLNSQISENFPISGGIRFPPYPGQFGSDREFGSQPTTQESNKSSLLDPDSVSDRVHTTKSNSRKRKSIPSGNGKESPASSSLTASNSKVSGENGGSKGGKRSKQDVAGSSKNGVEKCDSKGDNKDDAKPPEAPKDYIHVRARRGQATDSHSLAERARREKISERMTLLQDLVPGCNRITGKAVMLDEIINYVQSLQRQVEFLSMKLATVNPRMEFNANASLSTEMIQPGESLTQSLYAMACSEQRLPSAYYSLGKNMPRFSDTQFPSNDGFVHTETPGFWENNDLQSIVQMGFGDILQQQSNNNNNNCSEPTLQMKLEP

SEQ ID NO: 343 - DNA, 846 bp, Arabidopsis thaliana
atggaccctccactagtgaacgattcctccttctctgcagctaatccttcttcttacactctctccgagatttggcctttccctgtaaacgacgccgttcgctctggtctccgtttagctgttaactccggtcgagtctttactcgctctgaacattccggcaataaagacgtctccgcggctgaggaatctacagtcaccgatctaactgctggctggggaagtagaaagactagagatttgaactctgaggatgattcttcaaagatggtttcttccagcagcagtggtaatgaattgaaagaatcaggggataagaaaagaaaactgtgtggatctgaaagtggaaatggagatggttcgatgagacctgaaggcgaaacaagttcgggtggtggtggaagcaaagcaacggaacagaagaacaaacctgagccaccaaaggattatattcatgtgagagcaagaagaggacaagctactgaccggcatagtttagcagagcgagctagaagagaaaagatcagtgagaagatgacagctcttcaagatataattccaggatgtaataagataatcggaaaagcccttgtgctcgatgagattatcaattatattcagtcattgcagcggcaagttgagtttctatcaatgaagctagaagttgttaactcgggtgcaagtactggtccgacaataggagtttttccttccggtgatctcgggactttaccgattgacgttcatcgaacaatatacgagcaacaagaagctaatgaaacccgagtatctcaaccggagtggctccatatgcaggttgatgggaactttaaccgaaccacataa

SEQ ID NO: 344 - protein, 366 aa, Arabidopsis thaliana
MGGESNEGGEMGFKHGDDESGGISRVGITSMPLYAKADPFFSSADWDPVVNAAAAGFSSSHYHPSMAMDNPGMSCFSHYQPGSVSGFAADMPASLLPFGDCGGGQIGHFLGSDKKGERLIRAGESSHEDHHQVSDDAVLGASPVGKRRLPEAESQWNKKAVEEFQEDPQRGNDQSQKKHKNDQSKETVNKESSQSEEAPKENYIHMRARRGQATNSHSLAERVRREKISERMRLLQELVPGCNKITGKAVMLDEIINYVQSLQQQVEFLSMKLATVNPEINIDIDRILAKDLLQSRDRNTPTLGLNPFAGFQGNIPNLSATTNPQYNPLPQTTLESELQNLYQMGFVSNPSTMSSFSPNGRLKPEL

SEQ ID NO: 345 - DNA, 1101 bp, Arabidopsis thaliana
atgggtggtgagagtaatgaaggaggagagatgggctttaagcatggagatgatgagagtggtgggatctctagagttggaattacatcaatgcccttgtatgcaaaggcagatcctttcttctcttctgcagattgggatccagttgtcaatgctgctgctgctggcttctccagctctcattaccatccttccatggcgatggataatccagggatgagttgcttctctcattaccaacccggttctgtttccggttttgcagcagacatgcctgctagtcttcttccgtttggtgattgtggtggtggtcaaattggtcattttcttggttcagacaagaaaggggaaagattgatcagagctggagaatcatctcatgaggatcatcatcaggtttcagatgatgctgttcttggtgcttccccagttgggaaaagaaggctacctgaagccgaatcacaatggaacaagaaagctgtggaggaatttcaagaagaccctcaaaggggaaatgatcagagccagaagaagcataaaaatgatcagagtaaagagacggtgaacaaggagagctcacaaagtgaagaagcaccgaaagaaaactacattcatatgagggcaagaagaggtcaagccactaatagtcacagtcttgcagagcgggttagaagagaaaagatcagtgaaaggatgagattgcttcaagaacttgttcccggatgcaacaagatcaccggaaaagcggttatgctcgatgaaataatcaactatgttcagtcattgcaacagcaagttgagtttttgtctatgaaacttgcgacggtgaatccagagatcaatattgatatagacaggattctcgccaaagatcttctgcagtcaagagacagaaacactcctacactcgggctgaatccttttgccggttttcaagggaacataccaaacctttctgccaccacaaatccacaatacaacccactacctcagacaacactagagagtgaactacaaaacctttaccagatgggattcgtctcaaatccatcgactatgtccagtttctcacctaatggtcgattgaaacctgagctctag

SEQ ID NO: 346 - protein, 260 aa, Arabidopsis thaliana
MANFENLSSDFQTIAMDIYSSITQAADLNNNNSNLHFQTFHPSSTSLESLFLHHHQQQLLHFPGNSPDSSNNFSSTSSFLHSDHNIVDETKKRKALLPTLSSSETSGVSDNTNVIATETGSLRRGKRLKKKKEEEDEKEREVVHVRARRGQATDSHSLAERVRRGKINERLRCLQDMVPGCYKAMGMATMLDEIINYVQSLQNQVEFLSMKLTAASSFYDFNSETDAVDSMQRAKARETVEMGRQTRDGSPVFHLSTWSL

SEQ ID NO: 347 - DNA, 783 bp, Arabidopsis thaliana
atggcaaatttcgagaatctttcttctgattttcagacaatagccatggatatatattcttccataactcaagctgcagatctaaacaacaacaacagtaaccttcattttcaaacatttcatccttcctctacttctctcgaatcgctcttccttcatcatcatcaacaacaattacttcactttcccggaaactctccagacagtagtaacaatttctcttcaacttcaagtttcctccatagtgatcacaacatcgtcgatgagaccaagaagagaaaagctttgttacctactttgtcttcatcagagactagcggcgtctccgataatacgaatgttattgccactgaaacaggttctttgagaagaggtaagaggttgaagaagaagaaggaagaagaagacgagaaagagagagaagttgttcatgtgagagccagaagaggccaagccactgatagccacagcttagcagaacgggttcggcgagggaaaataaacgagagattaagatgcttgcaagatatggtgcccggatgttataaggctatgggaatggctacgatgcttgacgagataattaattatgtccagtctctacagaatcaagtcgagttcctctcgatgaaactcactgcagcaagttcgttttatgactttaactcagagacagatgcagttgattccatgcagagagcaaaggcacgtgagacagtggagatggggagacaaacaagagatgggagtcctgtcttccatttatcaacatggtccctttga

SEQ ID NO: 348 - protein, 223 aa, Arabidopsis thaliana
MARFEPYNYNNGHDPFFAHINQNPELINLDLPASTPSSFMLFSNGALVDANHNNSHFFPNLLHGNTRRKGNKEESGSKRRRKRSEEEEAMNGDETQKPKDVVHVRAKRGQATDSHSLAERVRREKINERLKCLQDLVPGCYKAMGMAVMLDVIIDYVRSLQNQIEFLSMKLSAASACYDLNSLDIEPTDIFQGGNIHSAAEMERILRESVGTQPPNFSSTLPF

SEQ ID NO: 349 - DNA, 672 bp, Arabidopsis thaliana
atggcacggtttgagccatataactataataatggtcatgatcctttctttgcacacattaaccaaaatccagagctaataaatctggacttaccagcttctaccccttccagtttcatgcttttctccaatggagctttagttgatgccaatcacaataattctcacttcttcccaaatttattgcacggtaatacgagaagaaaaggaaataaagaagagagtgggtcgaagagaagaagaaagaggtcggaagaggaagaagccatgaatggagatgagactcagaagccaaaagatgttgttcatgtccgagctaagagaggtcaagctactgatagccatagtttggctgaaagggtacgaagagagaagatcaatgaaaggctgaaatgcttacaagaccttgttccaggatgctacaaggcaatgggaatggcagtgatgcttgatgtcatcatagattatgtacgatcactccagaatcaaatcgagtttttgtccatgaaactctcagcggcaagtgcatgttacgaccttaattctttggatattgagccaacggatatatttcagggagggaatattcatagtgcagcagagatggaaaggattttaagagaaagcgttggaacacagcctcctaatttcagttcaacattacccttttga

SEQ ID NO: 350 - protein, 264 aa, Arabidopsis thaliana
MDPSGMMNEGGPFNLAEIWQFPLNGVSTAGDSSRRSFVGPNQFGDADLTTAANGDPARMSHALSQAVIEGISGAWKRREDESKSAKIVSTIGASEGENKRQKIDEVCDGKAEAESLGTETEQKKQQMEPTKDYIHVRARRGQATDSHSLAERARREKISERMKILQDLVPGCNKVIGKALVLDEIINYIQSLQRQVEFLSMKLEAVNSRMNPGIEVFPPKEFGQQAFENPEIQFGSQSTREYSRGASPEWLHMQIGSGGFERTS

SEQ ID NO: 351 - DNA, 795 bp, Arabidopsis thaliana
atggatccgagtgggatgatgaacgaaggaggaccgtttaatctagcggagatctggcagtttccgttgaacggagtttcaaccgccggagattcttctagaagaagcttcgttggaccgaatcagttcggtgatgctgatctaaccacagctgctaacggtgatccagcgcgtatgagtcacgcgttgtctcaggcggttattgaaggtatctccggcgcttggaaacggagggaagatgagtctaagtcggcgaagatcgtctccaccattggcgctagtgaaggtgagaacaaaagacagaagatagatgaagtgtgtgatgggaaagcagaagcagaatcgctaggaacagagacggaacaaaagaagcaacagatggaaccaacgaaagattatattcatgttcgagctagaagaggtcaagctactgatagtcacagtttagctgaaagagcgagaagagagaaaataagtgagcggatgaaaatcttgcaagatcttgttccgggatgtaacaaggttattggaaaagcacttgttctagatgagataattaactatatacaatcattgcaacgtcaagttgagttcttatcgatgaagcttgaagcagtcaactcaagaatgaaccctggtatcgaggtttttccacccaaagagtttggtcagcaagcgtttgagaatccggagatacagttcgggtcgcagtctacgagggaatacagtagaggagcatcaccagagtggttgcacatgcagataggatcaggtggtttcgaaagaacgtcttga

SEQ ID NO: 352 - protein, 261 aa, Arabidopsis thaliana
MANLSSDFQTFTMDDPIRQLAELSNTLHHFQTFPPPFSSSLDSLFFHNQFPDHFPGKSLENNFHQGIFFPSNIQNNEESSSQFDTKKRKSLMEAVSTSENSVSDQTLSTSSAQVSINGNISTKNNSSRRGKRSKNREEEKEREVVHVRARRGQATDSHSIAERVRRGKINERLKCLQDIVPGCYKTMGMATMLDEIINYVQSLQNQVEFLSMKLTAASSYYDFNSETDAVESMQKAKAREAVEMGQGRDGSSVFHSSSWTL

SEQ ID NO: 353 - DNA, 786 bp, Arabidopsis thaliana
atggcgaatctctcttctgattttcagacatttacaatggatgatcccataagacaactagcagaactgagcaacacgcttcatcatttccaaacatttcctcctcctttctcttcttctctcgattctcttttctttcataatcaattccctgatcattttcccggaaaatctctcgagaataattttcatcaagggatattcttcccttctaatatccaaaacaacgaagagtcttcttcacaattcgataccaagaagagaaaatcattaatggaagctgtttctacgtcggagaacagtgtctctgatcaaactctctctacctcttctgctcaagtttccataaatggaaatatttcgacaaaaaataattcttcaaggagagggaagaggtcgaagaatagagaagaagagaaagagagagaagttgttcatgttagagctagaagaggccaagccactgatagccacagcatagcagaacgggttcgacgagggaaaataaacgagagattgaaatgcttgcaagatatagtccccggatgttataagacaatgggaatggctactatgcttgatgagataattaattacgtccagtccttacaaaatcaagtcgagtttttatctatgaagcttacagcagcaagttcgtattatgactttaactcggagactgatgctgtggaatccatgcagaaggcaaaggcacgtgaggcagtggagatgggtcaagggagggatgggagttctgtcttccattcatcatcgtggaccctttga

SEQ ID NO: 354 - protein, 93 aa, Arabidopsis thaliana
MSGRRSRSRQSSGTSRISEDQINDLIIKLQQLLPELRDSRRSDKVSAARVLQDTCNYIRNLHREVDDLSERLSELLANSDTAQAALIRSLLTQ

SEQ ID NO: 355 - DNA, 282 bp, Arabidopsis thaliana
atgtcgggaagaagatcacgttcgaggcaatcatcaggaacttcaaggatctcagaagatcaaatcaatgatctgattatcaagttgcaacagcttcttcctgagctcagggacagtcgtcgttccgacaaggtttcagcagcgagggtgttacaagatacgtgcaactacatacggaatctgcatagagaggttgatgatctaagtgagaggctatctgagttactagcaaactcagacactgcacaagctgctttaatcagaagcttacttacccaataa

SEQ ID NO: 356 - protein, 335 aa, Arabidopsis thaliana
MLEGLVSQESLSLNSMDMSVLERLKWVQQQQQQLQQVVSHSSNNSPELLQILQFHGSNNDELLESSFSQFQMLGSGFGPNYNMGFGPPHESISRTSSCHMEPVDTMEVLLKTGEETRAVALKNKRKPEVKTREEQKTEKKIKVEAETESSMKGKSNMGNTEASSDTSKETSKGASENQKLDYIHVRARRGQATDRHSLAERARREKISKKMKYLQDIVPGCNKVTGKAGMLDEIINYVQCLQRQVEFLSMKLAVLNPELELAVEDVSVKQAYFTNVVASKQSIMVDVPLFPLDQQGSLDLSAINPNQTTSIEAPSGSWETQSQSLYNTSSLGFHY

SEQ ID NO: 357 - DNA, 1008 bp, Arabidopsis thaliana
atgttggaaggtcttgtctctcaagaaagcttgtccttaaactctatggacatgtctgtacttgaaaggcttaaatgggtacaacagcaacaacagcaactgcaacaagttgtgtcccatagcagtaataattcacctgaacttcttcagatacttcagttccatggaagcaacaatgatgagttgttggagagtagtttcagccaatttcaaatgcttggatctggttttggaccaaactataacatgggttttggtcctccacatgaatccatttcaagaacaagtagctgccatatggaacctgtggatacaatggaggttttgttgaagaccggtgaagaaaccagagccgttgccttgaagaacaagagaaaaccagaggttaagacaagggaagagcaaaagacagagaagaagatcaaagtagaggctgagacagagtcaagcatgaaaggaaaatcaaacatgggaaacactgaagcatcttcagacacttcaaaggagacatcgaaaggagcttcagagaatcagaaattagattatatccacgtgagagctcgtcgaggccaagccactgacagacacagcttagcagaaagggcgagaagagaaaagatcagcaagaaaatgaaatatctgcaagatattgtgcctggatgcaataaggtcacaggaaaagctggtatgcttgatgagatcatcaattatgttcaatgtctccaaagacaagtcgagttcctgtcgatgaaacttgctgtcttgaacccggaactagagcttgccgtggaagatgtatccgtaaaacaggcttactttacaaatgtagttgcttcaaagcaatcaataatggttgatgtgccattgtttccgttagaccagcaaggatctctagatttgtctgcgataaacccgaaccaaacgacatctatcgaagctccatctggaagctgggaaactcaatcacagagtctctacaacacatctagcctcggttttcattactaa

SEQ ID NO: 358 - protein, 327 aa, Arabidopsis thaliana
MDLTQGFRARSGVVGPVAGLESLNFSDEFRHLVTTMPPETTGGSFTALLEMPVTQAMELLHFPDSSSSQARTVTSGDISPTTLHPFGALTFPSNSLLLDRAARFSVIATEQNGNFSGETANSLPSNPGANLDRVKAEPAETDSMVENQNQSYSSGKRKEREKKVKSSTKKNKSSVESDKLPYVHVRARRGQATDNHSLAERARREKINARMKLLQELVPGCDKIQGTALVLDEIINHVQTLQRQVEMLSMRLAAVNPRIDFNLDSILASENGSLMDGSFNAESYHQLQQWPFDGYHQPEWGREEDHHQANFSMGSATLHPNQVKMEL

SEQ ID NO: 359 - DNA, 984 bp, Arabidopsis thaliana
atggatctgacccaaggtttcagagctagatccggcgttgttgggccggtggccggactagaatctctcaatttcagcgacgaatttcggcacttagtgacgacgatgcctccggagactactggcggctccttcacggctttactcgagatgcctgtgactcaggccatggagcttctccatttcccagattcatcgtcttctcaggccagaaccgttaccagtggtgatatttctcctaccactcttcaccctttcggggctttgacttttccttctaactcgcttctcttggaccgcgccgctcgtttctcggtgattgctacagagcaaaacggtaatttttccggcgagactgctaactctttaccttctaatcccggcgcgaatctggacagagtcaaagccgagcctgctgagaccgattcaatggtggagaatcagaaccagagctactcttctggaaaaaggaaagaacgcgagaagaaggtcaaaagctcgacgaagaagaacaagagctccgtggagtcagacaagttgccatatgttcatgtcagagctcgtcgtggtcaagctactgataaccatagcttagcagagagagcaagaagggagaagataaacgcacgaatgaagctgctacaggaactggtcccaggctgtgataagattcagggcactgcattggttctggatgaaatcattaaccatgtgcaaactttacagcgtcaagtggagatgctatctatgagacttgctgcagtaaaccccagaatcgacttcaatctagacagcatactggcttcagagaacggctctcttatggatggtagcttcaatgcagagtcttatcatcagctgcaacaatggcctttcgacggctaccaccagccggaatggggaagagaagaagatcatcatcaagccaatttctcaatgggttcagctactttacacccaaatcaggtgaaaatggagctctaa

SEQ ID NO: 360 - protein, 92 aa, Arabidopsis thaliana
MSSRKSRSRQTGASMITDEQINDLVLQLHRLLPELANNRRSGKVSASRVLQETCSYIRNLSKEVDDLSERLSQLLESTDSAQAALIRSLLMQ

SEQ ID NO: 361 - DNA, 279 bp, Arabidopsis thaliana
atgtctagcagaaaatcacgttcaagacaaactggagcttccatgatcacggatgaacaaatcaacgatcttgtcctccagcttcatcggcttctccccgaacttgctaacaacagacgctctggaaaggtttcagcatcaagggtattacaagagacatgcagttacataaggaacttgagcaaagaagtggatgatcttagtgaaagattgtctcaacttttggaatcaactgattcagctcaagctgcactaatccgaagtttgcttatgcagtag

SEQ ID NO: 362 - protein, 426 aa, Arabidopsis thaliana
MDLTGGFGARSGGVGPCREPIGLESLHLGDEFRQLVTTLPPENPGGSFTALLELPPTQAVELLHFTDSSSSQQAAVTGIGGEIPPPLHSFGGTLAFPSNSVLMERAARFSVIATEQQNGNISGETPTSSVPSNSSANLDRVKTEPAETDSSQRLISDSAIENQIPCPNQNNRNGKRKDFEKKGKSSTKKNKSSEENEKLPYVHVRARRGQATDSHSLAERARREKINARMKLLQELVPGCDKGTDFGGKIKIKVCFGVHLLMISGKKVAIFLWKVSCEDLIDCSFSPPRIQGTALVLDEIINHVQSLQRQVEMLSMRLAAVNPRIDFNLDTILASENGSLMDGSFNAAPMQLAWPQQAIETEQSFHHRQLQQPPTQQWPFDGLNQPVWGREEDQAHGNDNSNLMAVSENVMVASANLHPNQVKMEL

SEQ ID NO: 363 - DNA, 1281 bp, Arabidopsis thaliana
atggatctgactggaggatttggagctagatccggcggtgttggaccgtgccgggaaccaataggccttgaatcgctacatctcggtgacgaatttcggcaactagtgacgactttacctcccgagaaccccggcggttcgttcacggctttgcttgagcttccacctacacaagcagtggagcttctccatttcactgattcttcgtcttctcaacaagcggcagtgacagggatcggtggagagattcctccgccgcttcactctttcggtgggacattggcttttccttctaactcagttctcatggagcgagcagctcgtttctcggtgattgccactgagcaacaaaacggaaatatctccggggagactccgacgagctctgtaccttccaattcaagtgctaatctcgacagagtcaagacggagcctgctgagaccgattcatctcagcggttgatttctgattcagcgattgagaatcaaatcccttgccctaaccagaacaatcgaaatgggaagaggaaagatttcgaaaagaagggtaaaagctcgacgaagaagaacaaaagctctgaagagaacgagaagctgccatatgttcacgttagagctcgtcgtggtcaagcaaccgatagccatagcttagcagaacgagcaagaagagagaagataaatgcacgaatgaagctgttacaggaactggtcccaggctgtgataaggggacagattttggtggaaagatcaagatcaaagtgtgttttggggtccatcttttgatgataagtgggaaaaaagttgcaatctttctatggaaggtgagctgtgaggacttgattgattgttcctttagcccccctaggattcaaggtaccgcgctggtgctggatgaaatcattaaccatgtccagtcattacaacgtcaagtggagatgctatcaatgagacttgctgcggtaaaccccagaatcgacttcaatctcgacaccatattggcttcagaaaacggttctttaatggatgggagcttcaatgccgcaccaatgcagcttgcttggcctcagcaagccattgagaccgaacagtcctttcatcaccggcaactgcaacaaccaccaacacaacaatggccttttgacggcttgaaccagccggtatggggaagagaagaggatcaagctcatggcaatgataacagcaatttgatggcagtttctgaaaatgtaatggtggcttctgctaatttgcacccaaatcaggtcaaaatggagctgtaa

SEQ ID NO: 364 - protein, 335 aa, Arabidopsis thaliana
MNGAIGGDLLLNFPDMSVLERQRAHLKYLNPTFDSPLAGFFADSSMITGGEMDSYLSTAGLNLPMMYGETTVEGDSRLSISPETTLGTGNFKKRKFDTETKDCNEKKKKMTMNRDDLVEEGEEEKSKITEQNNGSTKSIKKMKHKAKKEENNFSNDSSKVTKELEKTDYIHVRARRGQATDSHSIAERVRREKISERMKFLQDLVPGCDKITGKAGMLDEIINYVQSLQRQIEFLSMKLAIVNPRPDFDMDDIFAKEVASTPMTVVPSPEMVLSGYSHEMVHSGYSSEMVNSGYLHVNPMQQVNTSSDPLSCFNNGEAPSMWDSHVQNLYGNLGV

SEQ ID NO: 365 - DNA, 1008 bp, Arabidopsis thaliana
atgaatggagctataggaggtgaccttttgctcaattttcctgacatgtcggtcctagagcgccaaagggctcacctcaagtacctcaatcccacctttgattctcctctcgccggcttctttgccgattcttcaatgattaccggcggcgagatggacagctatctttcgactgccggtttgaatcttccgatgatgtacggtgagacgacggtggaaggtgattcaagactctcaatttcgccggaaacgacgcttgggactggaaatttcaagaaacggaagtttgatacagagactaaggattgtaatgagaagaagaagaagatgacgatgaacagagatgacctagtagaagaaggagaagaagagaagtcgaaaataacagagcaaaacaatgggagcacaaaaagcatcaagaagatgaaacacaaagccaagaaagaagagaacaatttctctaatgattcatctaaagtgacgaaggaattggagaaaacggattatattcatgttcgtgcacgacgaggccaagccactgatagtcacagcatagcagaacgagttagaagagaaaagatcagtgagagaatgaagtttctacaagatttggttcctggatgcgacaagatcacaggcaaagcagggatgcttgatgaaatcattaactatgttcagtctcttcagagacaaatcgagttcttatcgatgaaactagcaattgtgaatccaaggccggattttgatatggatgacatttttgccaaagaggttgcctcaactccaatgactgtggtgccatctcctgaaatggttctttccggttattctcatgagatggttcactctggttattctagtgagatggttaactccggttaccttcatgtcaatccaatgcagcaagtgaataccagttctgatccattgtcatgcttcaacaatggcgaagctccttcgatgtgggactctcatgtgcagaatctctatggcaatttaggagtttga

SEQ ID NO: 366 - protein, 94 aa, Arabidopsis thaliana
MSSSRRSRQASSSSRISDDQITDLISKLRQSIPEIRQNRRSNTVSASKVLQETCNYIRNLNKEADDLSDRLTQLLESIDPNSPQAAVIRSLING

SEQ ID NO: 367 - DNA, 285 bp, Arabidopsis thaliana
atgtcttctagcagaaggtcgagacaagcaagctcatcatcaagaattagcgatgaccagatcactgatctcatctcaaagctccgacagtccattccggagattcgccagaaccgtcgttccaacacggtatcagcgtcgaaagtgttacaagagacttgcaactacataagaaacttgaacaaggaagccgatgacctcagtgatcgattgactcagcttctggaatccattgatcctaatagcccacaagccgcagttattaggagcttgattaatggataa

SEQ ID NO: 368 - protein, 92 aa, Arabidopsis thaliana
MSNRRSRQSSSAPRISDNQMIDLVSKLRQILPEIGQRRRSDKASASKVLQETCNYIRNLNREVDNLSERLSQLLESVDEDSPEAAVIRSLLM

SEQ ID NO: 369 - DNA, 279 bp, Arabidopsis thaliana
atgtcgaacagaagatcaaggcaatcttcaagtgctccaaggatctccgataatcaaatgattgacctcgtatctaagctccgtcaaattttgccggagattggtcaacgacgtcgttctgataaggcatcagcctcgaaagtattgcaagagacatgcaattacatacgaaatttgaacagagaagttgacaatctgagcgagcgtttgtctcagcttctcgaatctgtcgatgaagatagccctgaagccgccgttattagaagcctactcatgtaa

SEQ ID NO: 370 - protein, 286 aa, Arabidopsis thaliana
MATFSYFQNYPHSLLDPLLFPTPHSSINLTSFIDQNHLYPLPNISTVEDISFLEYNVDKTENSGSEKLANTTKTATTGSSSCDQLSHGPSAITNTGKTRGRKARNSNNSKEGVEGRKSKKQKRGSKEEPPTDYIHVRARRGQATDSHSLAERVRREKISERMRTLQNLVPGCDKVTGKALMLDEIINYVQTLQTQVEFLSMKLTSISPVVYDFGSDLDGLILQSEMGSPEVGTSFTNAMPTTTPIFPSLLDNSVVPTHAQVQEEGEERENFVDRSGFNNNNFCSFP

SEQ ID NO: 371 - DNA, 861 bp, Arabidopsis thaliana
atggcaactttctcttatttccaaaactaccctcattcccttcttgatcctcttctcttccctacacctcactcctccattaatctcactagtttcatcgatcaaaaccatctctatccactaccaaacatttccacagttgaagacatttcctttcttgaatataatgttgacaaaactgaaaactctggttcagagaaactggccaacacaaccaaaacagcaaccaccggttcttcttcctgcgaccagctcagccacggaccatcagccatcaccaacaccggaaaaacccgtgggaggaaggccagaaacagtaataactccaaggaaggagtagagggaagaaaaagcaaaaaacagaagagaggaagcaaagaagagcctccaacagattacattcacgttcgagctagaagaggccaagctactgatagccacagccttgctgagagggtgagaagggaaaagataagtgagcggatgaggactctgcaaaaccttgttccgggctgtgataaggtaacagggaaggccctcatgttggatgagattataaattatgtccagaccttgcagactcaagttgagtttctctcaatgaagctaacttctataagtccggtggtctatgactttggctccgaccttgatggcctcatacttcaatctgagatgggttctccagaagtaggaacgtcttttaccaatgcaatgccaacaactactcctatctttccttcactattggataattctgtagttcccacacatgcacaagttcaggaagagggagaagaaagagagaactttgtagacagaagtgggttcaacaacaacaacttctgttctttcccttga

SEQ ID NO: 372 - protein, 281 aa, Arabidopsis thaliana
MDPPLVNDSSFSAANPSSYTLSEIWPFPVNDAVRSGLRLAVNSGRVFTRSEHSGNKDVSAAEESTVTDLTAGWGSRKTRDLNSEDDSSKMVSSSSSGNELKESGDKKRKLCGSESGNGDGSMRPEGETSSGGGGSKATEQKNKPEPPKDYIHVRARRGQATDRHSLAERARREKISEKMTALQDIIPGCNKIIGKALVLDEIINYIQSLQRQVEFLSMKLEVVNSGASTGPTIGVFPSGDLGTLPIDVHRTIYEQQEANETRVSQPEWLHMQVDGNFNRTT

SEQ ID NO: 373 - DNA, 642 bp, Amborella trichopoda
atggaaggtgccttaaatgcatcttcagacatccctaatgaaagtgtagatgctaaattaagtggtgatcaaaacccaaatcctaatgctagtaaatccgctgcaaaacaagagaaagatcattcccaaaatcctgatacacccaaggaagattacatccatgttagagcgagaagaggccaggccacaaatagccatagtcttgcagaaagggtgagaagagagaagattagtgaacgcatgaaattccttcaagaccttgttcctggatgcaataaggttactggcaaggcagtcatgcttgatgagatcataaactatgtacagtctctgcaacggcaggtcgagtttctgtctatgaaattggctgctgtaaatccaaggttagacttcaatttagaagggcttcttcagaaagatattcttcaagcacgtggaagtacatcaacttctgttgggtttacgccagatatgaacatggcccatccacatatgcatccccctcaacagggattggtccaaatgggaatccctggagttgcaaacccagttgaaatgttgagaagaaccatgaaccctcatttaaacaccatgaatggatataaagattctgcaactcaggtggcaaatgtcttgggatga

SEQ ID NO: 374 - protein, 213 aa, Amborella trichopoda
MEGALNASSDIPNESVDAKLSGDQNPNPNASKSAAKQEKDHSQNPDTPKEDYIHVRARRGQATNSHSLAERVRREKISERMKFLQDLVPGCNKVTGKAVMLDEIINYVQSLQRQVEFLSMKLAAVNPRLDFNLEGLLQKDILQARGSTSTSVGFTPDMNMAHPHMHPPQQGLVQMGIPGVANPVEMLRRTMNPHLNTMNGYKDSATQVANVLG

SEQ ID NO: 375 - DNA, 1653 bp, Glycine max
atgggtgacaaagaaaagtttgagttggatagaaacgaggatcctatgagttattctagtggaatgcactcggattggagatttgggggtgcaaatattgcaagttcttctgtagctatggttggcctggggaattctatgaatgtcagcagaggggatttgattggttcttcttcatgttcctctgcttcaatggtggactcatttggtccaaactactgggaaaaccccacctgttcccaaaacttgggattttgtgacattaatgtccacaacaatgggggttcttcaagcacagttgcaatcagaaaagatggttttggatttggaagagctggtcaggatcatcatgaaacacttgaaatgggttggaaccctgctaattctatattatcaaatggaccagggatgtttccccacactttgtctcagtttccaactgattctggattcattgagagagctgcaagattctcatgcttcagtggagggaattttagtgatatggtaaactcatatgggattgctcaatccatggggctgtatggagcaagagatgctattgcaggccatgggatgaaatcagtaactggagggcaatctcagggaggtgatatgaatgtagttgaagctacaaaggatgtgtctccatctgttgaacatcttgttgctgctaaaggaagccctctcaagagtgatagaagaagtgaaggccatgttatatcccaagatgaagggaagcaatctcttgttaggcccgctaatgagtctgatagagctgaatctagtgatgatggtggtggtcaggatgactccccaatgttggaaggtactagtggggaaccttctagcaaaggactaaacacaaagaaaaggaaaagaagtggacaggatggtgataatgataaagccaatggagctcaagaactacctagtgaaggtgcagaggacaactatgagaatcaacagaagggagaccaccaaccaacttcaacagccaaggcttctgggaagaatgccaaactggggtctcaagcttctgatccacccaaggaggaatacatacatgttagagctcgccggggtcaagcaacaaacagccatagccttgcagagagagtgaggagggaaaagataagtgagagaatgaagtttcttcaagatcttgtacctggatgcagcaaggtcactggcaaggcagtaatgctagatgaaatcatcaactatgtacagtcacttcaacgacaggttgagtttttgtctatgaaacttgcaacagtaaatccacggctggattttaatattgaaggacttcttgctaaagatattcttcaacaacggcctggtccttcatccgcactagggtttcctctagatatgtccatggcttttcctccattacatccacctcaacctgggctgattcatccagtaattcccaacatggcaaactcatctgatatccttcaaagaaccatccatccacagttagctcccttgaatggtggattaaaggaaccaaatcagctgcctgatgtatgggaggatgaacttcacaatgttgtacagatgagctttgcaacaactgctccccttactagccaagattttgatggtactgggccagcaagtcagatgaaagttgaactttga

SEQ ID NO: 376 - protein, 550 aa, Glycine max
MGDKEKFELDRNEDPMSYSSGMHSDWRFGGANIASSSVAMVGLGNSMNVSRGDLIGSSSCSSASMVDSFGPNYWENPTCSQNLGFCDINVHNNGGSSSTVAIRKDGFGFGRAGQDHHETLEMGWNPANSILSNGPGMFPHTLSQFPTDSGFIERAARFSCFSGGNFSDMVNSYGIAQSMGLYGARDAIAGHGMKSVTGGQSQGGDMNVVEATKDVSPSVEHLVAAKGSPLKSDRRSEGHVISQDEGKQSLVRPANESDRAESSDDGGGQDDSPMLEGTSGEPSSKGLNTKKRKRSGQDGDNDKANGAQELPSEGAEDNYENQQKGDHQPTSTAKASGKNAKLGSQASDPPKEEYIHVRARRGQATNSHSLAERVRREKISERMKFLQDLVPGCSKVTGKAVMLDEIINYVQSLQRQVEFLSMKLATVNPRLDFNIEGLLAKDILQQRPGPSSALGFPLDMSMAFPPLHPPQPGLIHPVIPNMANSSDILQRTIHPQLAPLNGGLKEPNQLPDVWEDELHNVVQMSFATTAPLTSQDFDGTGPASQMKVEL

SEQ ID NO: 377 - DNA, 1263 bp, Glycine max
atgttgcattgtctcaacacttcggggaatctaggagccacctgttcggacatgacagtgttggaaagacaacgggaagcaaccatcaagtggcagcaacacctccagaacaaccaaccaccctacttaacggactttaacgttaacgttaacgccgtcttctcttcttcttcttcttcttctcagagtcagggcctggtcatgaatatttgcgctgattccgcgctcggcgaggtcctaactcactccgtcaaacccgacccgggtgtctggcccgaattcgacgccggattcggatcctcttccggttttctacccaccatttcgccaacttgtagcagaggcggagacttggtttcacccaaggaaaacatggccagtgcgaaagaaaacactaagaagagaaaacctcagaactccaaggttgttgcggcgagtgataataaacaggacaagagagtcaaagcaagtggtgaagaaggagaatccaaagtaacagagcaaaccagcaacaagaatggcaaatccaacgcaaataaaaacaacaacagagaaacaacctctgcggagacttccaaggataattcgaaaggctccgaggttcaaaatcagaagccagagtacattcatgtccgagcgcgtcgtggacaagccacggatagtcatagcttagctgaaagagttaggagggagaagattagtgagagaatgaagtatttgcaagatttagtaccgggttgcaacaaagttgcagggaaagctggaatgcttgatgaaattattaactatgttcagtctcttcaacgccaagttgagttcttgtcaatgaaattagcggctgtaaacccaaggcttgacttcaaccttgacgaactatttaccaaagaggtgtttccttcttgtgctcaaagttttccaaacattgggatgccattagatatgagtatgagtaacaacccttcgtatctaccatttaattcagcgcagcaacttgtatcgtgctgtggtggactaataaacaacatggggataagccctccaaacatgggactccgaaggaacattagtactagccctgtacctttgcccgaaacgtttcttgactcgtcctgtttcactcaaattctaccctcctcaaattgggaaggtggtgatttccaaagcctttacaacgttgcttttgatcaagggcgaacagcatcttttccttctcagccatttacaggtctagttgaagctagcaatctaaagatggagatgtaa

SEQ ID NO: 378 - protein, 420 aa, Glycine max
MLHCLNTSGNLGATCSDMTVLERQREATIKWQQHLQNNQPPYLTDFNVNVNAVFSSSSSSSQSQGLVMNICADSALGEVLTHSVKPDPGVWPEFDAGFGSSSGFLPTISPTCSRGGDLVSPKENMASAKENTKKRKPQNSKVVAASDNKQDKRVKASGEEGESKVTEQTSNKNGKSNANKNNNRETTSAETSKDNSKGSEVQNQKPEYIHVRARRGQATDSHSLAERVRREKISERMKYLQDLVPGCNKVAGKAGMLDEIINYVQSLQRQVEFLSMKLAAVNPRLDFNLDELFTKEVFPSCAQSFPNIGMPLDMSMSNNPSYLPFNSAQQLVSCCGGLINNMGISPPNMGLRRNISTSPVPLPETFLDSSCFTQILPSSNWEGGDFQSLYNVAFDQGRTASFPSQPFTGLVEASNLKMEM

SEQ ID NO: 379 - DNA, 525 bp, Medicago truncatula
atgagaacaagaattctttcattgcaacaagaaaatgagaaaatggaagtggctaattctcaagaagaatctacaatatctgagcaaaatacaccaaatggtgaaattggtgtcaaagcttcacctgatatgaattcaaggaaaagaaaagcttcttcttccaaaggaaaagcaccaaactctaccaatcctacgaagggtgttgaaggtagtggtgaagacttcaatgcaaagaaaattaaggcaaatgagggtgagagaaatgaaaatggtgtcaggaatatggaggaagagatcaaagaaggtacaccaaatgcaggggaagaaaaacagaacaagagtgactcaaaacctcctgaacctcaaaaagattacattcatgtcagagcaagaagaggtcaagctactgacagtcacagtcttgcagaacgagtaaggagggagaaaataagtgagaggatgaaacttctccaagatcttgtaccaggttgcaataaggttactggaaaagcaccttatgcttga

SEQ ID NO: 380 - protein, 228 aa, Medicago truncatula
MLEGTTSGEPSMKGLNSKKRKRSGQDADNDKPNGTQELQNEGAKDNPENQQKCDQQPTSTIKASGKNAKQGSQNSDPPKEEYIHVRARRGQATNSHSLAERVRREKISERMKFLQELVPGCSKVTGKAVMLDEIINYVQSLQRQVEFLSMKLATVNPRLDFNIESLLAKDVLHQRPGPSSTLGFPLEMSMNFPPLHPSQPGMIQSVIPNMANPSDILRRTIHTQLTPR

SEQ ID NO: 381 - DNA, 789 bp, Oryza sativa
atgctgaacatgtcccgctccatttcttctttgggtttacaggttggagaggcgaaggcgccggactccaagaaatgcaaagcggaggtgaatcccaaggtggaagaagccgccagcgatggctcggtgggagacagagtgcagaagcaaggaaaggggaagaactcatccaagccggccgccgagccgcccaaggactacgtccatgtccgggcacggcgaggtcaggccactgacagccacagccttgcagagagggttagaagagagaagattagccagcggatgaaagtgcttcaggacctggtgcctggatgcaacaaggtggttggcaaggcactcatgcttgatgagatcataaactacgtgcaatcgttgcagcagcaggtcgagttcctgtccatgaagctcgcgaccgtgaatccgcagctcgactttggcaacctatctacactcttacagaaagatatgttccaatcttgtggcccttcggtgaattccgtatttcctttggaaagtgccggtacagcttttccattttgtgaccaagcagattttttccagtcatttggtctgggagccatggaaaaccaatgtagcctagatctggcaaacacagctctaccccacacagggagcacacagtatgcttttcagaagcagcaaagggatctctgggaggataatactttccagtataacgacgaacaaagccaggaggatgcggtttctgcaccgaatttcgatggtcagttgcaagcagcagatcacacagagatcgagttctag

SEQ ID NO: 382 - protein, 262 aa, Oryza sativa
MLNMSRSISSLGLQVGEAKAPDSKKCKAEVNPKVEEAASDGSVGDRVQKQGKGKNSSKPAAEPPKDYVHVRARRGQATDSHSLAERVRREKISQRMKVLQDLVPGCNKVVGKALMLDEIINYVQSLQQQVEFLSMKLATVNPQLDFGNLSTLLQKDMFQSCGPSVNSVFPLESAGTAFPFCDQADFFQSFGLGAMENQCSLDLANTALPHTGSTQYAFQKQQRDLWEDNTFQYNDEQSQEDAVSAPNFDGQLQAADHTEIEF

SEQ ID NO: 383 - DNA, 963 bp, Picea sitchensis
atgatggcacagaggcttgatatatcaggaggaaatgattcctcaatctctgaacttgaacagactaatgctcatccagatctgacttcaaaggacatcatcaatctcagaaaaagaaaatgcctctcaaaccccaaagttaaagttgcagatgtacactcaattcctccaaagaccaaggaaacagatgagactgagaggaatggaaagcactacaaagttggagagagtacaaaagacaaggatgatttaaaggataagcttgaagaaagtaacagtgccgaaacagctgaaagctgtcccaaacaaacagtagataatgcgaaaccttcttctgtatcagtcaagcaagactacattcatgtgagagcgagaagaggccaagcaactgacagccatagtctggcagagagggttagacgagaaaagatcagcgaacggatgaaacttttgcaagaccttgtccctggatgtaataaggtaactgggaaagcggttatgcttgatgagataatcaactatgtacaagcactacagtgtcaagtggagttcctctctatgaaacttgcagctgttaatccccagctggactgtaatgtggaaggaggttatcttactagagatgtgctccagccacattgctcgtcaataagtaagatgtttgctcctgacacaactgcagccgcttctcagattaaccagttacaaaagacccccttgcaacatggcttacaatgtagagcagacaggcaagaacttgctatcagagggatgatggatacacaatttacgtgtatgaatggctatgcagatcctacttttcagttgcagatgtcacagggctgggatgatgagttccaaaatgccgttgacataggattggatcagaacagatccaatcctttgaaatcacatggattccatggagtgctacctacagggcacatgaaagttgagctttaa

SEQ ID NO: 384 - protein, 320 aa, Picea sitchensis
MMAQRLDISGGNDSSISELEQTNAHPDLTSKDIINLRKRKCLSNPKVKVADVHSIPPKTKETDETERNGKHYKVGESTKDKDDLKDKLEESNSAETAESCPKQTVDNAKPSSVSVKQDYIHVRARRGQATDSHSLAERVRREKISERMKLLQDLVPGCNKVTGKAVMLDEIINYVQALQCQVEFLSMKLAAVNPQLDCNVEGGYLTRDVLQPHCSSISKMFAPDTTAAASQINQLQKTPLQHGLQCRADRQELAIRGMMDTQFTCMNGYADPTFQLQMSQGWDDEFQNAVDIGLDQNRSNPLKSHGFHGVLPTGHMKVEL

SEQ ID NO: 385 - DNA, 963 bp, Pinus taeda
atgatggcacagaggcttaacatattaggaggcaatgattcttccatctctgaacatcaacagaccaatgctcattcagatctgacttcaaaggacaccgtcaatcacagaaaaagaaaatgcctctcaaaccccaaagttaaagtggcagatgcactctcaattcctctaaagatcaaggaaacaaatgagactgagaggagtggaaagcactacaaagttggggagagtacaaaagacaaggatgatttaaaggataagcttgaagaatgtaacagtgctgaaacagctgaaagctgtcccaaacaaacagttgataatgtgaaaccttcttctgtgccagtcaagcaagactacattcatgtgagagcaagaagaggccaagcgaccgatagccatagcctggcagagagggttagacgagaaaagataagcgaacggatgaaacttttgcaagatcttgtccctggatgtaataaggtaactgggaaagcggttatgcttgatgagataattaactatgtacaagcactacagtgtcaagtggagttcctctctatgaaacttgcagctgttaatccccagatggactataatgttgagggtggttatcttactagagatgtgcttcagccacattgctcctcagtaagtaagatgtttgctcctgaaacaactgcaaccacttctcagattaaccagttacaaaagacccccttgcaacatggcatgcaatgtagagcagacaggcaagaagttgccatcagagggatgatggatacacaattgacatgtatgaatggccatgcagatcctacttttcagttgcagatgtcacaaggctgggatgacgtgttccaaaatgccgttgacataggattggatcaaaacagatccacttctttgaaatcacatggattccatggattgctacctacagggcacatgaaagttgagctttaa

SEQ ID NO: 386 - protein, 320 aa, Pinus taeda
MMAQRLNILGGNDSSISEHQQTNAHSDLTSKDTVNHRKRKCLSNPKVKVADALSIPLKIKETNETERSGKHYKVGESTKDKDDLKDKLEECNSAETAESCPKQTVDNVKPSSVPVKQDYIHVRARRGQATDSHSLAERVRREKISERMKLLQDLVPGCNKVTGKAVMLDEIINYVQALQCQVEFLSMKLAAVNPQMDYNVEGGYLTRDVLQPHCSSVSKMFAPETTATTSQINQLQKTPLQHGMQCRADRQEVAIRGMMDTQLTCMNGHADPTFQLQMSQGWDDVFQNAVDIGLDQNRSTSLKSHGFHGLLPTGHMKVEL

SEQ ID NO: 387 - DNA, 1059 bp, Sorghum bicolor
atggacagcgactacgttgccagcctgctcatgggctcatccgcccatgcgctcgacttcgccgcgctggacaccgggttcctcgacacgctctgcggcggcgccggcctctttggggtgcccggggtcgccgcggggactgggtgtggcagcggcggcggcggcgggtccccggaggggtcctcggtgtccgacccggcgtgggcgcgcgccagcgacggcggcaatgccaggaagcgcaaggcgccgcccacggggtccgccggcgggaaggagacctgcttgggcaaggctgcggaggccaaggttccggacgggaagaggtgcagagtgggcgctagcgacagtccggtgaagcccaaggtagaggaggcggcggcgagcgacgcctcggttgaagtcaaagggcagaagaagggcaaggggaagagcccgaagccggcagtcgaaccacccaaagactacgtccatgtccgggcacggcgaggtcaggcaactgacagccacagccttgcagagagggttagaagagagaagattagccagaggatgaagtttctacaggacctagtgccaggatgcaacaaggtggttggcaaggcactcatgctcgatgagatcataaactacgtgcaatcgctgcagcagcaagttgagttcctgtccatgaagcttgccactgtgaacccgcaacttaatttcagcaacctgtcgactctcctacacaaagatatgtaccaaccatgtggcccatcagctaattcggtctttccattggaaagtgccggtgcagcttttccattttgtgaccaaggggatcttttccagaactttggttcgggtgctatggaggatcagtgctctctaagtctgttagacacggctctaccccacacggccaacccacagtttgcttttcaaaagcagcaaagggacttctgggaggatggcctacagaatgctttgcctaccggtagtgagcaaagacaggaggatgggcttttagtaccgaactttgatggtcagttacaagctgatcaggcaaagattgagttctag

SEQ ID NO: 388 - protein, 352 aa, Sorghum bicolor
MDSDYVASLLMGSSAHALDFAALDTGFLDTLCGGAGLFGVPGVAAGTGCGSGGGGGSPEGSSVSDPAWARASDGGNARKRKAPPTGSAGGKETCLGKAAEAKVPDGKRCRVGASDSPVKPKVEEAAASDASVEVKGQKKGKGKSPKPAVEPPKDYVHVRARRGQATDSHSLAERVRREKISQRMKFLQDLVPGCNKVVGKALMLDEIINYVQSLQQQVEFLSMKLATVNPQLNFSNLSTLLHKDMYQPCGPSANSVFPLESAGAAFPFCDQGDLFQNFGSGAMEDQCSLSLLDTALPHTANPQFAFQKQQRDFWEDGLQNALPTGSEQRQEDGLLVPNFDGQLQADQAKIEF

SEQ ID NO: 389 - DNA, 2193 bp, Selaginella moellendorffii
atggctgctgtaccacacgtatcgtctgccgagtccctattccatgagggcatggacgtctcgcatcctcaagcactgcctcgagtcgtcaccaccgctcagcagcacggcttctccacgcctatgtcccttgatttccacgacaagtttactttggagagatcacttccaagctacgcctcgtcgagctttcagctggtcggacagtcttcctcttcttgggagccgcagcagcagaatgccgacacacacttcttcacgtccagcggcaatgcagcagcacaggtgttgagtatacactcctcgcatcatctcaccggaggagaacagcatgaaattctcgtcgactggcagcaaatgggagattttgcgtcgtcccttgggagtggaggctctggtttaactccctcgagcactactacaactgctactacagctcaaggagcggcattgtccgatggaaccatggtggagctaattggacggataggggggtgtctctccaccagtgcgagcacaaactcttcaatgagatcgagtcctcatctcctggcgtccgaggcgaaaagtggatggaattctccagtggaggcggcaagtcagcatcacgggactcatggtttcatttcgtttgggaacggtaacgccgccgctgctgctactgcttctcacttaagtcaagccgtctttgcgttggttgacgagaacaaagatcacatcagatctggtgttgcgatcccactttgccaggctgatgcaagtaagttgccagttgttgagacgaaagttgaggcatctgtggatgacaccagtggggccaagagcgcgcaagaaacaagtcaggcgtcgattgtcaaggaatccaccggaaggaagcggaggacattgtccgaggacaagctcaaagacggttcttcgtgtgtgaccagcagcggtatcaaggatggagagcaagttaaaggcaagcgacagaggaatccaaacgcgaaggaagagtcaaaacagcatggtaatggtaaagccgatcgaagcagcagtgacaactctggaagcacaagccccaagtcagtcaaggagaacacaaaaccacccgagcctcccaaggactacattcatgtgagagctcgaaggggacaagcaaccgatagtcatagcctcgctgaaagggttcgaagggagaaaatcagcgagcgtatgaagttcttgcaggatctagtacccggatgtaacaaagttactggaaaagccgtgatgcttgatgaaatcattaactacgtccagtcgctccagcgtcaagttgagttcctgtcaatgaagctggcagccgtgaacccccgcctggagttcaacgtcgaaagtctactaggaaaagaggtgccgcatggacgggcctctccaacaaattttgtcctggggccccaaagctattcgcagcagctgcatcaagcacaacacagtgccttgcaacttgccggtttcgacttgagaacactgaccggtttacaagaagttgctatgcgaagaggagctttcccgtgcctcgatccatacagtgatcccgcctcacagacatcaagtgtttgggatggggagctacagaacatcgttcacatgatgggctttgtggagaatggtcagtccttgaagattatttcttgcaattattttgttcgtaccgctgctaaccagactagagaagagaagattactcacaacaccagcgaggaagggagtgtggatcgcatttctagttatagccagtcaaggaattttcccgccctcgtgatttccaagtaccaaagctcgtgctctacgagctttggtacttggaagaatttcggtctctcttggcttctcgaagagctcatcgccgagctgcggctgaatttcgtgggctgctgcaacgagctggctatgcgcgggcgaaaggcgtgggagcttgcaaatttgccggtgatttgcatcgttggaggccccaattcgaatgactatgagagcaatcgagttcttcatcacacgattggagtcgcggattttactcaggagatcgcatgcttcaagcaagttacctgtgctcaggtggttgtcaaggacctggaggatgctcacgagttgatcgactacgccatatttacgtgcctctggcggaagttggcggcaaggaaaaaactctggtgcaaagcttcgagttaa

SEQ ID NO: 390 - protein, 730 aa, Selaginella moellendorffii
MAAVPHVSSAESLFHEGMDVSHPQALPRVVTTAQQHGFSTPMSLDFHDKFTLERSLPSYASSSFQLVGQSSSSWEPQQQNADTHFFTSSGNAAAQVLSIHSSHHLTGGEQHEILVDWQQMGDFASSLGSGGSGLTPSSTTTTATTAQGAALSDGTMVELIGRIGGCLSTSASTNSSMRSSPHLLASEAKSGWNSPVEAASQHHGTHGFISFGNGNAAAAATASHLSQAVFALVDENKDHIRSGVAIPLCQADASKLPVVETKVEASVDDTSGAKSAQETSQASIVKESTGRKRRTLSEDKLKDGSSCVTSSGIKDGEQVKGKRQRNPNAKEESKQHGNGKADRSSSDNSGSTSPKSVKENTKPPEPPKDYIHVRARRGQATDSHSLAERVRREKISERMKFLQDLVPGCNKVTGKAVMLDEIINYVQSLQRQVEFLSMKLAAVNPRLEFNVESLLGKEVPHGRASPTNFVLGPQSYSQQLHQAQHSALQLAGFDLRTLTGLQEVAMRRGAFPCLDPYSDPASQTSSVWDGELQNIVHMMGFVENGQSLKIISCNYFVRTAANQTREEKITHNTSEEGSVDRISSYSQSRNFPALVISKYQSSCSTSFGTWKNFGLSWLLEELIAELRLNFVGCCNELAMRGRKAWELANLPVICIVGGPNSNDYESNRVLHHTIGVADFTQEIACFKQVTCAQVVVKDLEDAHELIDYAIFTCLWRKLAARKKLWCKASS

SEQ ID NO: 391 - DNA, 657 bp, Solanum tuberosum
atggaggaatcaaaggatgatgaaacccaaaaacaagttatggaaaatcaaaagcctcctgaaccaccaaaggactatattcatgttagggcaaggagaggacaagctactgatagccatagtctagcagaaagagtgagacgagagaagattagtgaaagaatgaagctgttacaagatcttgtaccaggctgtaataaggtgacaggaaaagcactaatgcttgatgaaattataaattatgtacagtcactccaacgacaagtcgagttcctatccatgaagttggcaacagtgaacccaaatttggattatcccctttccaaggatatatgtcaaccaaatggctctctgccccatcctgttttcccagtagataaaacatcatcttcttaccaacaaggccggagcgatattcctaatggggcactaagtcgatgctcagtggacacgttagataactcactatgccgcagcctaggaatgcaattgcctccccttgatggatttgctgaatatcttaatcagttccctgcaatatgcgaggatgacctgcaaagctttgtgcagatgggatttagccaaaaccccaacaaggatatgacactgcaatcacaagggcctcatcaaacgtctcacatgaaaattgagatgtag

SEQ ID NO: 392 - protein, 218 aa, Solanum tuberosum
MEESKDDETQKQVMENQKPPEPPKDYIHVRARRGQATDSHSLAERVRREKISERMKLLQDLVPGCNKVTGKALMLDEIINYVQSLQRQVEFLSMKLATVNPNLDYPLSKDICQPNGSLPHPVFPVDKTSSSYQQGRSDIPNGALSRCSVDTLDNSLCRSLGMQLPPLDGFAEYLNQFPAICEDDLQSFVQMGFSQNPNKDMTLQSQGPHQTSHMKIEM

SEQ ID NO: 393 - DNA, 1065 bp, Zea mays
atgatggtcagcttcggacacacagagagagagagcgctttgcttgccacaggtcttggtacccacctatatacaaaaatatcaaccttgggaggatcaccagggactagaactcaacctttgtctggtcagcatgtaactggccatcaaagttgggtactaaaagcccatcctcctcctgtctttgctcactaccggtaggcaaggcgttctgtaggccatcctcccagaagtccctctgctgcttttgaaaagcgaactgtgggttggccgcgtggggcagagccgtgtctagcaggcttagagagcactgatcctccatagcagccgaacccgaaccaaagctgtggaaaagatccgcttggtcacagaatgggaaagctgcaccgtcactttccagtggaaagaccgaatttgccgaagggccacatggttggtacatgtctttgtgtaggagtgtcgacaggttgctgaagtcaagctgtgggttcacagtggcgagcttcatggacaggaactcgacttgctgctgcagagactggacgtagtttatgatctcatcgagcatgagtgccttgccaactaccttgttgcatcctggcactaggtcctgcagaaacttcatcctctggctgatcttctctcttctaaccctctctgcgaggctgtggctgtcagtcgcctgccctcgccgcgcccggacatggacgtagtccttgggcggttcgactgccggcttggcggtcttccccttgcccttcttctgcgctttgagttcaaccgaggcgtcgctcgccgccacctcctctaccttcggcttcaccgggctgtcgctgccgcccactctgcacctcttcccgtccggacccttggcctccgcagccttgcccgggcaggcttccttgccgccggcggaccccgtgggcggcgccttgcgcttcctgacattgtcatcgcccctggcgcgcgcccacgccgggtcggacaccgacgacccctccggggacacgccgccacacccggcccccgcggcgaccccggacaccccgaagaggccgccgccgc

SEQ ID NO: 394 - protein, 354 aa, Zea mays
MDSDYVASLLMGMGSSAPALDFAALDAGFLETLCGGGGGLFGVSGVAAGAGCGGVSPEGSSVSDPAWARARGDDNVRKRKAPPTGSAGGKEACPGKAAEAKGPDGKRCRVGGSDSPVKPKVEEVAASDASVELKAQKKGKGKTAKPAVEPPKDYVHVRARRGQATDSHSLAERVRREKISQRMKFLQDLVPGCNKVVGKALMLDEIINYVQSLQQQVEFLSMKLATVNPQLDFSNLSTLLHKDMYQPCGPSANSVFPLESDGAAFPFCDQADLFHSFGSGSAAMEDQCSLSLLDTALPHAANPQFAFQKQQRDFWEDGLQNALPTGSEQRQEEDGLLVPNFDGQLHADQTKVEF

SEQ ID NO: 395 - DNA, 938 bp, Oryza sativa
ttgatgagcaatgcttttttataatgccaactttgtacaaaaaagcaggcttaaacaatggaggtcggctcgctgcagcacctcggcgacagcttctcctaccggtggctcaagcacgcggcgcaggcgccgtcgttcaagcgcctcgtcgacgacgatgtcggcggaagctccaggtacttcatcgacatggaccccgccgacctcttctccatgcggtggacggctccgggcaccgacttcgacttcgacttcgacctgcccggcggcgacgacgatgccgcctctccgatcccgctgctggtcagcgcgagccagatcttccacgatggccgtctacttccccacgagctcgacgacgacggccgcttcggtgcccaagaagacggcgatgccgctcgcgtcgcgcacttgctgagcgagccccggctctcggcctcgtcgccgctgttccactcagcgcagagcacgccggcctcgctgagctcgtcgtccagcgcgaggagcggcgccagcaagaacgccagcgcgccgccgctgctcgccgcggggaggcgtggcggcgggtcatcgccgtggaagatactgctcaggtacctgcggttcctcatgccgctctaccggaaggtcagggcgctgccgccgctgcgtgctccgaggacgagggtctcgccggcgagccccgcgagcgcgagagcaagggcgtccacgtccagcatcgactggtgccacggcattgccgacacggccgtccatgacgccatcctctactgcaagaaatccagtggacaaaatatatagccaggaacaaaggattcacaatctgacccagctttcttgtacaaagttggcattataagaaagcattgcttatcaatttgttgcaacgaacaggtcactatcagtcaaaataaaatcattatttgccatccagctga

SEQ ID NO: 396 - protein, 247 aa, Oryza sativa
MEVGSLQHLGDSFSYRWLKHAAQAPSFKRLVDDDVGGSSRYFIDMDPADLFSMRWTAPGTDFDFDFDLPGGDDDAASPIPLLVSASQIFHDGRLLPHELDDDGRFGAQEDGDAARVAHLLSEPRLSASSPLFHSAQSTPASLSSSSSARSGASKNASAPPLLAAGRRGGGSSPWKILLRYLRFLMPLYRKVRALPPLRAPRTRVSPASPASARARASTSSIDWCHGIADTAVHDAILYCKKSSGQNI

SEQ ID NO: 397 - DNA, 925 bp, Arabidopsis thaliana
acaaattgatgagcaatgcttttttataatgccaactttgtacaaaaaagcaggcttaaacaatggaagaaggtaagcaagaagcttcaatgccactagttccaattgacagcttctcttacagttggttagttaactttccttctttagaagctaccattgatgatcatcatcaaacatacgaagattcatcttcttcttcttccttcattgagatggatccaagattgcctccttctagaagattcttcatcaaaacatctcatgaaagtagcttcaagttcgataacttcgtctctttctccgacgaagatcactctttagttcacgccgacgagctcttccgtgacggctacgttatgccttatcgattaaagcccacgtccgcggctaccgaggaagaatctgagccgttggatacaacaacatcggagaagattgatacacgtggccttaacagcaagccttctcctacttcttcaagaaagctgaggagagtgtccaaatgggttttgctgaagtatcttgatttcttgacgccattgtgtaagagattaaggagatgtagatccgctgtaacaacgggaagtatcggtatggattcgaggattcgtgtaacgacttcgtgtaggagcagagtttattctgatgaaatgacgtcgtcgccaagaataagtgttgctgatgattattattggagaaggtcttgtgactctgagagctctatatacgaagccgttcttcattgcaagaaatcattcgagaaataagaagaataatccatggaagaggagcagttagaaacccagctttcttgtacaaagttggcattataagaaagcattgcttatcaatttgttgcaacgaacaggtcactatcagtcaaaataaaatcattatttgccatccagctgattcccctata

SEQ ID NO: 398 - protein, 235 aa, Arabidopsis thaliana
MEEGKQEASMPLVPIDSFSYSWLVNFPSLEATIDDHHQTYEDSSSSSSFIEMDPRLPPSRRFFIKTSHESSFKFDNFVSFSDEDHSLVHADELFRDGYVMPYRLKPTSAATEEESEPLDTTTSEKIDTRGLNSKPSPTSSRKLRRVSKWVLLKYLDFLTPLCKRLRRCRSAVTTGSIGMDSRIRVTTSCRSRVYSDEMTSSPRISVADDYYWRRSCDSESSIYEAVLHCKKSFEK

SEQ ID NO: 399 - DNA, 1088 bp, Arabidopsis thaliana
cccaaataatgattttattttgactgatagtgacctgtttcgttgcacaaattgatgagcaatgcttttttataatgccaactttgtacaaaaaagcaggcttaaacaatggcgaatctctcttctgattttcagacatttacaatggatgatcccataagacaactagcagaactgagcaacacgcttcatcatttccaaacatttcctcctcctttctcttcttctctcgattctcttttctttcataatcaattccctgatcattttcccggaaaatctctcgagaataattttcatcaagggatattcttcccttctaatatccaaaacaacgaagagtcttcttcacaattcgataccaagaagagaaaatcattaatggaagctgtttctacgtcggagaacagtgtctctgatcaaactctctctacctcttctgctcaagtttccataaatggaaatatttcgacaaaaaataattcttcaaggagagggaagaggtcgaagaatagagaagaagagaaagagagagaagttgttcatgttagagctagaagaggccaagccactgatagccacagcatagcagaacgggttcgacgagggaaaataaacgagagattgaaatgcttgcaagatatagtccccggatgttataagacaatgggaatggctactatgcttgatgagataattaattacgtccagtccttacaaaatcaagtcgagtttttatctatgaagcttacagcagcaagttcgtattatgactttaactcggagactgatgctgtggaatccatgcaggcaaaggcacgtgaggcagtggagatgggtcaagggagggatgggagttctgtcttccattcatcatcgtggaccctttgacttttgttttacccagctttcttgtacaaagttggcattataagaaagcattgcttatcaatttgttgcaacgaacaggtcactatcagtcaaaataaaatcattatttgccatccagctgatatcccctatagtgagtcgtattacatggtcatagctgtttcctggcagctctggcccgtgtctcaaatctctga

SEQ ID NO: 400 - protein, 260 aa, Arabidopsis thaliana
MANLSSDFQTFTMDDPIRQLAELSNTLHHFQTFPPPFSSSLDSLFFHNQFPDHFPGKSLENNFHQGIFFPSNIQNNEESSSQFDTKKRKSLMEAVSTSENSVSDQTLSTSSAQVSINGNISTKNNSSRRGKRSKNREEEKEREVVHVRARRGQATDSHSIAERVRRGKINERLKCLQDIVPGCYKTMGMATMLDEIINYVQSLQNQVEFLSMKLTAASSYYDFNSETDAVESMQAKAREAVEMGQGRDGSSVFHSSSWTL

SEQ ID NO: 401 - DNA, 1539 bp, Oryza sativa
tcgttgcacaaattgatgagcaatgcttttttataatgccaactttgtacaaaaaagcaggcttaaacaatgaatgagaaggacgccactgatttggaggagaggagtgaggccagtgagcacggccaagctctgagtttccatggtggtgccatgttcttgcaagaggctcagattgcttctcctgcagctgcaaataatgcattgacctccatggcgaatcctttccctatccctcctgggttgtggaatccaccttcacacaacatgggtttaggcgaaaccagtttttcatccttgttggggatgctgtcggccggcgcgccgccaccgtttgtggctactcccgggtttgtagattccacggcggggtttccttgctacaatggaggcaatcttggagccatgatcaatcaccctttccctggtatccaccagcctttgggtgatttccaaaacggcgtcgagccatgtagggagattgaggatattgagattgaaggatccaagaatgtgtcacaaactggtgagaagcagcaaggggatggtgagacaacgcatgccgtcgattcctcctccaaggagctaagcatgccagggcgcaatggtggcgctggccatgatgaggggactagggtgtcttgttccaagaagaggaaaagatcaggacaggatggtggggtgaagcatgcagaaggtggtgagcaattagcaactgtcggttcagcgcagaagaatgaggatgatgaaaagggtgaaccaaagaggtcttctgtggcgtccgggaaatccagtgggaagcaaataaaggataatgcaggttcaccaaaggaagactatatacatgtaagagcacggcgcggtcaggctacaaacagccatagtcttgccgaaagggttaggagggagaagatcagtgaaaggatgaaatatcttcaggatcttgttcctggttgtagtaaagtaactggtaaggctgttatgctggatgagataattaactatgttcaatcattacagaggcaggttgagtttttgtcgatgaagctagcaagtgtcaatccaacactggacttcaacatagaacgcattttatctaaagatatttttcaatgtcgaggcactactgcatcatctgcctttggcttcttcccagacattgttcatccccgattacacccaccaaaatatacacaagttgggatgcccagcattgtgaaccccactgatgcatttggaagagtaatccatgctccattaggaactaacagtgcattcaaagaacctaaacatcagatgcccaacaatttgaatggagagttccaggacgtcattgagatgccttttactcatgaccatcatggatcaaatgatcaaccctgagattgattccacaactgaagcaagacccagctttcttgtacaaagttggcattataagaaagcattgcttatcaatttgttgcaacgaacaggtcactatcagtcaaaataaaatcattatttgccatccagctgatatcccctatagtgagtcgt

SEQ ID NO: 402 - protein, 437 aa, Oryza sativa
MNEKDATDLEERSEASEHGQALSFHGGAMFLQEAQIASPAAANNALTSMANPFPIPPGLWNPPSHNMGLGETSFSSLLGMLSAGAPPPFVATPGFVDSTAGFPCYNGGNLGAMINHPFPGIHQPLGDFQNGVEPCREIEDIEIEGSKNVSQTGEKQQGDGETTHAVDSSSKELSMPGRNGGAGHDEGTRVSCSKKRKRSGQDGGVKHAEGGEQLATVGSAQKNEDDEKGEPKRSSVASGKSSGKQIKDNAGSPKEDYIHVRARRGQATNSHSLAERVRREKISERMKYLQDLVPGCSKVTGKAVMLDEIINYVQSLQRQVEFLSMKLASVNPTLDFNIERILSKDIFQCRGTTASSAFGFFPDIVHPRLHPPKYTQVGMPSIVNPTDAFGRVIHAPLGTNSAFKEPKHQMPNNLNGEFQDVIEMPFTHDHHGSNDQP

SEQ ID NO: 403 - protein, 50 aa, Artificial sequence
  motif bHLH
ATDSHSLAERVRREKISERMKFLQDLVPGCNKVTGKAVMLDEIINYVQSL

SEQ ID NO: 404 - protein, 9 aa, Artificial sequence
  motif 16
YIHVRARRG

SEQ ID NO: 405 - protein, 15 aa, Artificial sequence
  motif 17
  VARIANT (1)..(1): / replace = "Glu"
  VARIANT (3)..(3): / replace = "Lys"
  VARIANT (4)..(4): / replace = "Glu"
SPPKDYIHVRARRGQ

SEQ ID NO: 406 - protein, 13 aa, Artificial sequence
  motif 18
  VARIANT (1)..(1): / replace = "Asn" / replace = "Cys"
  VARIANT (5)..(5): / replace = "Asn"
  VARIANT (11)..(11): / replace = "Ala" / replace = "Thr"
  VARIANT (12)..(12): / replace = "Ala"
  VARIANT (13)..(13): / replace = "Ser"
RQVEFLSMKLSVN

SEQ ID NO: 407 - protein, 14 aa, Artificial sequence
  motif 19
  misc_feature (3)..(4): Xaa can be any naturally occurring amino acid
ADXXFVERAARYSC

SEQ ID NO: 408 - protein, 6 aa, Artificial sequence
  E-box
CANNTG

SEQ ID NO: 409 - DNA, 57 bp, Artificial sequence
  primer 1
ggggacaagtttgtacaaaaaagcaggcttaaacaatggaaagagataagttgtttg

SEQ ID NO: 410 - DNA, 50 bp, Artificial sequence
  primer 2
ggggaccactttgtacaagaaagctgggtagggactgtttattggttaat

SEQ ID NO: 411 - DNA, 2194 bp, Oryza sativa; identical to SEQ ID NO: 184

SEQ ID NO: 412 - DNA, 1199 bp, Arabidopsis thaliana
gccaactttgtacaaaaaagcaggcttaaacaatggcttcccccacccagggccaggtcatcacctgcaaagcggcggtggcgtacgagccgaacaagccgctcgtgatcgaggacgtgcaggtggcgccgccgcaggccggcgaggtccgcgtcaagatcctcttcaccgcgctctgccacaccgaccactacacctggagcggcaaggatcctgagggtctctttccttgcattcttggccacgaagctgccggagttgtggaaagtgtcggcgaaggagtaactgaggtgcagcctggggatcatgtcattccttgttaccaggcagaatgcaaagagtgcaagttttgcaagagcggaaagaccaacctctgtggtaaggttcgtggtgccactggcgtgggtgtcatgatgaatgatatgaagagcaggttctctgtaaatggaaagcccatttaccatttcacggggacatcaacattcagccagtacactgtggtgcatgatgtcagtgttgcaaagatcaacccacaggcacccctagataaagtctgcctgctcggttgtggtgttcctactggtcttggagcagtgtggaatactgcaaaggttgaagctggctctattgttgctgtttttggccttggcacagttggacttgcagttgctgagggtgcaaaagctgctggtgcttctcgaattattggcattgacattgacaataaaaagtttgacgttgcaaagaactttggagttacagaatttgttaacccaaaagaccatgacaaaccgatacagcaggtcttagttgatcttacagatggtggcgtggattacagttttgaatgcattggaaatgtttcagttatgagggctgcactggaatgctgccacaaggactggggaacctctgtcatcgttggtgtcgctgcttctggccaggagattgccacacggccattccagctcgttactggccgtgtctggaagggaacagctttcggtggcttcaagagccgaactcaggtcccatggcttgttgataagtacatgaacaaggaagttaaggtggacgagtacattacccacaacatgaacctggctgacatcaacgacgctttccacctgctgcacgaaggtggctgtctgcgttgtgtgctggctatgcaaatttgaaattcctaagcaaagccgttt

SEQ ID NO: 413 - protein, 381 aa, Arabidopsis thaliana
MASPTQGQVITCKAAVAYEPNKPLVIEDVQVAPPQAGEVRVKILFTALCHTDHYTWSGKDPEGLFPCILGHEAAGVVESVGEGVTEVQPGDHVIPCYQAECKECKFCKSGKTNLCGKVRGATGVGVMMNDMKSRFSVNGKPIYHFTGTSTFSQYTVVHDVSVAKINPQAPLDKVCLLGCGVPTGLGAVWNTAKVEAGSIVAVFGLGTVGLAVAEGAKAAGASRIIGIDIDNKKFDVAKNFGVTEFVNPKDHDKPIQQVLVDLTDGGVDYSFECIGNVSVMRAALECCHKDWGTSVIVGVAASGQEIATRPFQLVTGRVWKGTAFGGFKSRTQVPWLVDKYMNKEVKVDEYITHNMNLADINDAFHLLHEGGCLRCVLAMQI

SEQ ID NO: 414 - DNA, 1477 bp, Saccharum officinarum
tgcttcacaacgttcaaatccgctcccggcggatttgtcctactcaggagagcgttcaccgacaaacaacagataaaacgaaaggcccagtcttccgactgagcctttcgttttatttgatgcctggcagttccctactctcgcgttaacgctagcatggatctcgggccccaaataatgattttattttgactgatagtgacctgttcggttgcacaaattgatgagcaatgcttttttataatgccaactttgtacaaaaaagcaggcttaaacaatggcttcccccacccagggccaggtcatcacctgcaaagcggcggtggcgtacgagccgaacaagccgctcgtgatcgaggacgtgcaggtggcgccgccgcaggccggcgaggtccgcgtcaagatcctcttcaccgcgctctgccacaccgaccactacacctggagcggcaaggatcctgagggtctctttccttgcattcttggccacgaagctgccggagttgtggaaagtgtcggcgaaggagtaactgaggtgcagcctggggatcatgtcattccttgttaccaggcagaatgcaaagagtgcaagttttgcaagagcggaaagaccaacctctgtggtaaggttcgtggtgccactggcgtgggtgtcatgatgaatgatatgaagagcaggttctctgtaaatggaaagcccatttaccatttcatggggacatcaacattcagccagtacactgtggtgcatgatgtcagtgttgcaaagatcaacccacaggcacccctagataaagtctgcctgctcggttgtggtgttcctactggtcttggagcagtgtggaatactgcaaaggttgaagctggctctattgttgctgtttttggccttggcacagttggacttgcagttgctgagggtgcaaaagctgctggtgcttctcgaattattggcattgacattgacaataaaaagtttgacgttgcaaagaactttggagttacagaatttgttaacccaaaagaccatgacaaaccaatacagctggtattagttgatattgcagatggtggggaggacaacagtgaagacatcataagaaattcatcagttaggagggctgcagaggaatgccgccacaaggactggggaacctctgtcatcgttggtgtcgctgcttctggccaggagattgccacacggccattccagctcgttactggccgtgtctggaagggaacagctttcggtggcttcaagagccgaactcaggtcccatggcttgttgataagtacatgaacaaggaagttaaggtggacgagtacattacccacaacatgaacctggctgacatcaacgacgctttccacctgctgcacgaaggtggctgtctgcgttgtgtgctggctatgcaaatttgaaattcctaagcaaagccgtttgcatatatgtcacccagctttcttgtacaaagt

SEQ ID NO: 415 - protein, 381 aa, Saccharum officinarum
MASPTQGQVITCKAAVAYEPNKPLVIEDVQVAPPQAGEVRVKILFTALCHTDHYTWSGKDPEGLFPCILGHEAAGVVESVGEGVTEVQPGDHVIPCYQAECKECKFCKSGKTNLCGKVRGATGVGVMMNDMKSRFSVNGKPIYHFMGTSTFSQYTVVHDVSVAKINPQAPLDKVCLLGCGVPTGLGAVWNTAKVEAGSIVAVFGLGTVGLAVAEGAKAAGASRIIGIDIDNKKFDVAKNFGVTEFVNPKDHDKPIQLVLVDIADGGEDNSEDIIRNSSVRRAAEECRHKDWGTSVIVGVAASGQEIATRPFQLVTGRVWKGTAFGGFKSRTQVPWLVDKYMNKEVKVDEYITHNMNLADINDAFHLLHEGGCLRCVLAMQI

SEQ ID NO: 416 - DNA, 1363 bp, Arabidopsis thaliana
aagaagaccacactactctctctatctctctttctctctatctctctctatctctctcatttcttcctgcgtcaatggcgactcaaggtcaggttatcacttgcaaagctgcggtggcttacgagccgaacaagcctctggtcatcgaagatgtgcaagtggctccacctcaagctggtgaggttcggatcaagatcctctacactgctctttgtcacaccgacgcttacacttggagcggcaaggatcctgaaggtctctttccttgtattctaggtcatgaggctgctgggattgttgagagtgttggtgaaggagtaactgaagttcaagctggagatcatgttatcccttgttatcaagctgagtgtcgtgaatgcaagttttgcaaatctgggaagactaacctttgtggcaaggtgagatctgctactggtgttgggattatgatgaatgaccgtaagtcgaggttctcggttaatgggaaacccatttatcacttcatgggtacttccacgtttagtcagtatactgttgttcatgatgttagcgtcgccaaaattgatcctactgctcctttggataaagtttgccttcttggatgtggtgttcccactggccttggagcagtttggaatactgcaaaagtagaaccagggtcaaatgttgccattttcggtcttggcactgttggacttgctgttgccgagggtgcgaaaacagctggtgcttcaaggatcattggcattgacatcgatagcaagaagtatgaaactgcaaagaagtttggtgttaacgaatttgtgaacccaaaggatcacgacaagccaattcaggaagtgattgtcgatctcactgatggcggtgttgactacagctttgagtgcatcgggaatgtctccgtgatgagagctgcattggagtgctgtcacaagggatggggaacttcggtcatagttggtgttgcagcatcaggacaagagatatcaactcgtccgttccaactcgtgactggccgtgtgtggaaaggaacagcttttggtggtttcaagagtcgaacccaagtgccttggcttgtagaaaagtacatgaacaaggagataaaagtggatgaatacataacacacaacttgaccttgggagaaatcaataaggctttcgatctattgcacgaaggtacttgccttcgttgtgtcctcgataccagcaaatgactatatgggtcctctctgctttaatctatgtgttcttgtgactttcgtcttttatcggtattgacatttcctaagagcaacagactactctactcgtgtgtgtctcgtttctatcttatgcttcaataaaatatcaattaagaccgaaa

SEQ ID NO: 417 - protein, 379 aa, Arabidopsis thaliana
MATQGQVITCKAAVAYEPNKPLVIEDVQVAPPQAGEVRIKILYTALCHTDAYTWSGKDPEGLFPCILGHEAAGIVESVGEGVTEVQAGDHVIPCYQAECRECKFCKSGKTNLCGKVRSATGVGIMMNDRKSRFSVNGKPIYHFMGTSTFSQYTVVHDVSVAKIDPTAPLDKVCLLGCGVPTGLGAVWNTAKVEPGSNVAIFGLGTVGLAVAEGAKTAGASRIIGIDIDSKKYETAKKFGVNEFVNPKDHDKPIQEVIVDLTDGGVDYSFECIGNVSVMRAALECCHKGWGTSVIVGVAASGQEISTRPFQLVTGRVWKGTAFGGFKSRTQVPWLVEKYMNKEIKVDEYITHNLTLGEINKAFDLLHEGTCLRCVLDTSK

SEQ ID NO: 418 - DNA, 1143 bp, Medicago truncatula
atggcatcgtcgactgaaggtcaagtcattacatgcaaagctgcggtggcctgggaacccaacaaacccttaacaatcgaagatgttgaggtcgctcctccccaagccaacgaagtccgaattcaaatcctcttcaccgctctctgtcacactgatgcttatacttggagtggcaaagatcctgaaggtcttttcccttgcattcttggtcacgaagctgctggtattgtggaaagtgttggagaaggtgtcactgatgttaagcctggggatcatgtcattccatgttaccaagctgagtgtggggaatgtaagttttgcaaatccggtaagaccaatctctgtggcaaggttcgtgccgctactggggttggggttatgatgaatgatcgcaaacctcggttttctatcaagggaaaacccatttatcattttatgggaacttctacttttagtcagtacactgttgttcatgatgttagtgttgctaagattcatccagatgctgctttggacaaagtttgtcttcttggatgtggtgttccaaccggtctcggagctgtctggaacactgcaaaagttgagccagggtccattgttgctattttcggtcttggaactgttgggcttgctgttgcagagggtgcaaaatctgctggtgcatcacggattattggcatagatattgatagcaacaagtttgatacagcaaaaaactttggagtcactgagttcattaatccaaaagaccatgagaaaccaattcagcaggtcataagtgatctaacagatggaggagtcgattatagctttgagtgcatcggaaatgtctctgtgatgagatctgctttggaatgcacccacaagggatgggggacatcagttgttgtgggcgttgcagcatcagggcaggaaatatcaactcgccctttccagttggtgactgggcgtgtatggaaaggaacagcttttggcggctttaagagcaggtcacaagtgccttggcttgttgaaaagtacttgaagaaggaaatcaaggttgatgagtacgttacccataatttgactcttgcggagatcaacgaggcatttgatcttatgcatgaagggaaatgtcttcgttgtgtgcttgcattgcattga

SEQ ID NO: 419 - protein, 380 aa, Medicago truncatula
MASSTEGQVITCKAAVAWEPNKPLTIEDVEVAPPQANEVRIQILFTALCHTDAYTWSGKDPEGLFPCILGHEAAGIVESVGEGVTDVKPGDHVIPCYQAECGECKFCKSGKTNLCGKVRAATGVGVMMNDRKPRFSIKGKPIYHFMGTSTFSQYTVVHDVSVAKIHPDAALDKVCLLGCGVPTGLGAVWNTAKVEPGSIVAIFGLGTVGLAVAEGAKSAGASRIIGIDIDSNKFDTAKNFGVTEFINPKDHEKPIQQVISDLTDGGVDYSFECIGNVSVMRSALECTHKGWGTSVVVGVAASGQEISTRPFQLVTGRVWKGTAFGGFKSRSQVPWLVEKYLKKEIKVDEYVTHNLTLAEINEAFDLMHEGKCLRCVLALH

SEQ ID NO: 420 - DNA, 1155 bp, Oryza sativa
atgtctactgctggcaagactattacctgtaaggccgccgtcgcctgggaggccggcaagcctctgtccattgaggatatcgaggttgctcctcccaaggccaacgaggtccgaatccagatctactacactggtgtttgccacacagatgcctacacactctctggcaaggaccccgagggtgctttccccattgtccttggacacgagggtgccggtattgtcgagtccattggtgagggcgtcaccaacgtcaaggttggtgaccacgtcgtcgctctctacacccccgaatgcaaggagtgcaagttctgcaagtccggaaagaccaacctttgcggtaagatccgagccacccagggcaagggtctgatgcccgacggcacctctcgattcaagtgcaagggcaaggatctgcttcacttcatgggcacttccaccttctcccagtacaccgtcgtcgccgatatctccgtcgttgccattgagcacgacgctcccatggaccgaacctgtctgctcggctgcggtatcaccaccggttacggtgctgccaccatcaccgccaacgtccaggctggcgacaacgttgccatcttcggtgccggttgtgtcggtctctcagttgtccagggtgctgccgctcgcaaggctggcaagatcatcgttgttgacgtcaacccttccaagaaggagtggggtgagaagttcggtgctactgacttcgtgaacccccccgagctcggtgaccagtccatccaggacaagcttatcgagatgaccgacggtggttgtgactacacctttgactgcactggcaatgttggtgtcatgcgcgctgccctcgaggcctgccacaagggttggggtgagtccatcgttatcggtgttgccgctgctggccaagagatttccacacgaccattccagcttgttactggccgagtgtggcgaggatgtgctttcggcggtgtcaagggccgttctcagctgaacgatctcgttgccgactacaagaagggtgacctcaaggttgacgagttcatcacccaccgcaagaccctcggcgagattaacaacgctttcgacacaatgaagcagggtgactgcatccgtgctgtcgtcgacatgcaaaagctcgagcctaagatttaa

SEQ ID NO: 421 - protein, 384 aa, Oryza sativa
MSTAGKTITCKAAVAWEAGKPLSIEDIEVAPPKANEVRIQIYYTGVCHTDAYTLSGKDPEGAFPIVLGHEGAGIVESIGEGVTNVKVGDHVVALYTPECKECKFCKSGKTNLCGKIRATQGKGLMPDGTSRFKCKGKDLLHFMGTSTFSQYTVVADISVVAIEHDAPMDRTCLLGCGITTGYGAATITANVQAGDNVAIFGAGCVGLSVVQGAAARKAGKIIVVDVNPSKKEWGEKFGATDFVNPPELGDQSIQDKLIEMTDGGCDYTFDCTGNVGVMRAALEACHKGWGESIVIGVAAAGQEISTRPFQLVTGRVWRGCAFGGVKGRSQLNDLVADYKKGDLKVDEFITHRKTLGEINNAFDTMKQGDCIRAVVDMQKLEPKI

SEQ ID NO: 422 - DNA, 1134 bp, Oryza sativa
atgagcacgcaaggaaaagttattaagtgtaaagctgcggttgcttggggtgccaaacaacagctcaagatcgaagagatcgaagtcgatccaccgaaagccggtgaagtccgaattaagataacggccaccggagtttgccacactgatgcctatacactaggtggtgaagatagcgaagccgtctttccggttattctcggccatgagggagccggcgtcgtcgagtcggtcggtgagggtgtgacgtcagttgcgcctggcgaccatgttatcccactttatacacctcaatgcaagaactgcgagtactgccgtagtccaaagacgaatctttgcgtgaaaatcagagcgacacaaggtaaaggtctgatgcctgatggaacgactcgcttcagtattaatggtcaacggttgtatcactatatggggtgtagtacgtttagcgaatatacagttgttgcagatatttcggttgcaaagataaatccggcggctcctttagataaaatcggacttatcggttgtggaatcagcactggctacggtgcagctttagtcactgccaaagtcgaaaaaggttcaacagtaggtgtgtggggtctcggcgccgttggcttggccgttataatgggagctaaagcggctggtgctaaagaaatcgtcggtatcgatatcaaccctaacaagttcaagacagccatcgaattcggcgctactcaatgtgtcaacccgaacgatttccccgacaagcctttccagcagacgctcattgagaaattcgatggtggcttcgactatactttcgagtgcatcggaaacgtgaatactatgagatgtgccctcgaagctagccacagaggttggggtgtttcggttattattggggtcgccggagccggaaaagagatcgccacaaggccattccagctggtcactggacgcacttggaaaggaaccgcttttggaggttggaagagtgttgatcaagttcccgagttggttgagaagtatttgacaaaggagctcaaagttgacgagttcatcactcatacaatgccactcgccgaaatcaacaaggcttttgatctaatgcacagcggagaaagcttgcgttcaatgattcaattctaa

SEQ ID NO: 423 - protein, 377 aa, Oryza sativa
MSTQGKVIKCKAAVAWGAKQQLKIEEIEVDPPKAGEVRIKITATGVCHTDAYTLGGEDSEAVFPVILGHEGAGVVESVGEGVTSVAPGDHVIPLYTPQCKNCEYCRSPKTNLCVKIRATQGKGLMPDGTTRFSINGQRLYHYMGCSTFSEYTVVADISVAKINPAAPLDKIGLIGCGISTGYGAALVTAKVEKGSTVGVWGLGAVGLAVIMGAKAAGAKEIVGIDINPNKFKTAIEFGATQCVNPNDFPDKPFQQTLIEKFDGGFDYTFECIGNVNTMRCALEASHRGWGVSVIIGVAGAGKEIATRPFQLVTGRTWKGTAFGGWKSVDQVPELVEKYLTKELKVDEFITHTMPLAEINKAFDLMHSGESLRSMIQF

SEQ ID NO: 424 - DNA, 1146 bp, Oryza sativa
atggcttcctcgacccagggccaggtcatcacctgcaaagcggcggtggcatgggaggccaacaggccgatgacgatcgaggacgtgcaggtggcgccgccgcaggccggcgaggtccgtgtcaagatcctcttcaccgcgctctgccacaccgaccactacacctggagcggcaaggatcctgagggtctatttccttgcattcttggtcatgaagctgctggaattgttgaaagtgttggggaaggagtaactgaggtgcagcctggggaccatgtcattccttgttaccaagcagaatgcagagaatgcaagttttgcaagagtggaaagaccaacctctgtggcaaagttcgtgctgccacaggggtcggtgtcatgatgaatgatcgcaagagccgtttctcaataaatggaaaacccatttatcatttcatgggaacatctacattcagccagtatactgttgtgcacgatgtcagtgtcgcaaagataaacccacaggcacctctagacaaagtttgcctgcttggctgcggtgtttctactggcctcggagcagtatggaataccgcaaaggttgaagcaggttccatcgttgctatttttggacttggcacagttggacttgcagttgctgagggggcaaaatcagctggtgcttctcggattattggcatcgacattgatagcaaaaagtttgatgtcgcaaagaactttggggttacagaatttgtgaacccaaaggaccatgacaaaccaatccaacaggtcatagttgaccttacagacggtggtgtggactacagctttgaatgcattggaaatgtttctgttatgaggtctgcattggagtgctgccacaagggctggggaacctctgtcatcgttggtgtagctgcttctgggcaagaaatctctacacgaccattccagctcgtcactggccgtgtctggaagggaacagctttcggcggtttcaagagccgaagccaagttccatggctcgttgagaagtacttgaacaaggaaatcaaggtggacgagtacgttactcacagcatgaacctgactgacatcaacaaggcgtttgacctgctgcatgaaggtggctgcctgcggtgtgttctggcaactgataaatga

SEQ ID NO: 425 - protein, 381 aa, Oryza sativa
MASSTQGQVITCKAAVAWEANRPMTIEDVQVAPPQAGEVRVKILFTALCHTDHYTWSGKDPEGLFPCILGHEAAGIVESVGEGVTEVQPGDHVIPCYQAECRECKFCKSGKTNLCGKVRAATGVGVMMNDRKSRFSINGKPIYHFMGTSTFSQYTVVHDVSVAKINPQAPLDKVCLLGCGVSTGLGAVWNTAKVEAGSIVAIFGLGTVGLAVAEGAKSAGASRIIGIDIDSKKFDVAKNFGVTEFVNPKDHDKPIQQVIVDLTDGGVDYSFECIGNVSVMRSALECCHKGWGTSVIVGVAASGQEISTRPFQLVTGRVWKGTAFGGFKSRSQVPWLVEKYLNKEIKVDEYVTHSMNLTDINKAFDLLHEGGCLRCVLATDK

SEQ ID NO: 426 - DNA, 255 bp, Physcomitrella patens
atgaacccatttcttgagttgcaggacctagaaggactattttcctgtatcttgggtcacaaagctgctgaatatgttgaagttgtagagagtgtaggcaagagagtgacagagttgaagcctagagatcatgttattccttgctacgaagctgaatgctgtgaatgcaagttctgcaaatccgtagaaacaaatttgtgtggaaaagtcagtcctgcaactagaaagtgggtcatgctaagctaccatcagtag

SEQ ID NO: 427 - protein, 84 aa, Physcomitrella patens
MNPFLELQDLEGLFSCILGHKAAEYVEVVESVGKRVTELKPRDHVIPCYEAECCECKFCKSVETNLCGKVSPATRKWVMLSYHQ

SEQ ID NO: 428 - DNA, 1185 bp, Physcomitrella patens
atggcagatgagccggaacccgcatcgcaccgggaggtcgacaattcttctacccaggggaagcccattacctgtcgagccgccatagcctatgagaagagcaagcctcttgttatagaaaatgtcgaagttgcacctcctcaggcaggcgaagtaagagtgaaaatactttacacggctctttgtcacactgacttttacaccctcagcggcaaggacccagaaggactattcccctgtatcctgggtcacgaagctgccggagtcgtggagagtgtaggcgagggagtgacagagttgaagcctggagatcatgttattccttgctaccaagctgaatgccgtgaatgcaagttctgcaaatccggcaaaacgaatttgtgtgggaaagtccgtcctgcaactggaaagggagtcatgctaagcgacggccagtcgaggttcaaagttgctgggaaacccatctatcatttcatggggacatcaacgttcagtgaatatactgttctgcatgatgtgtctgtagcgaaaatcaatcctgatgcacctcttgacaaagtctgtcttcttggatgcggcattccaacagggttgggcgctgtgtttaacacggccaaagtggaaccaggttcaaatgtggcagtatttgggcttggcacagttgggctggctgtatgtgaaggagctaagaaggcaggagctaagcgcataattggagttgacacagatccttcgaagtttgatcttgctgtgaagtttggagctacggagtacgtgaatcccaaggacttcgataagcccattcaagatgtcctcgtggagatgaccgatggtggagtggattacagctttgagtgcataggcaatgttcaagttatgcgtgcagctcttgaggcttgtcacaagggatggggaacctcagtgattgttggagtagcggcagctggacaggagatctcaacacgcccttttcagcttgtgacgggtcgtgtttggaagggaactgcatttggtggttacaaaagtcgaacggatgttcctaagcttgtagatgagtatatgaagcaggaaatcaaacttgacgagtacatcactcacaagtttcctctaggcaagatcaatgaagcgtttggcttgctggaagccggaaaatgcttgcgagctgtcattaacatggagcaatga

SEQ ID NO: 429 - protein, 394 aa, Physcomitrella patens
MADEPEPASHREVDNSSTQGKPITCRAAIAYEKSKPLVIENVEVAPPQAGEVRVKILYTALCHTDFYTLSGKDPEGLFPCILGHEAAGVVESVGEGVTELKPGDHVIPCYQAECRECKFCKSGKTNLCGKVRPATGKGVMLSDGQSRFKVAGKPIYHFMGTSTFSEYTVLHDVSVAKINPDAPLDKVCLLGCGIPTGLGAVFNTAKVEPGSNVAVFGLGTVGLAVCEGAKKAGAKRIIGVDTDPSKFDLAVKFGATEYVNPKDFDKPIQDVLVEMTDGGVDYSFECIGNVQVMRAALEACHKGWGTSVIVGVAAAGQEISTRPFQLVTGRVWKGTAFGGYKSRTDVPKLVDEYMKQEIKLDEYITHKFPLGKINEAFGLLEAGKCLRAVINMEQ

SEQ ID NO: 430 - DNA, 1331 bp, Populus trichocarpa
gcatccatccatccatccatccatccatccatggctactcagggacaggtcatcacttgccgagctgcggttgcttgggaggcgaacaagccgctggtgatagaggaagtgcaggtggctccaccacaggccggtgaggttcgagtcaagattctcttcgctgctctttgccacactgatgcttacacctggagtggcaaggatccggaagggctcttcccttgtattcttggtcatgaggctgctgggtatgcatatcatagacattatccaatgattgtagaaagtgttggtgaaggtgtgactgaggttcaaccaggtgatcatgttatcccttgctaccaggcagaatgcagagagtgcaagttttgcaaatcagggaagacgaacctttgtggcaaagttcgcacagcaactggtgttggagtcatgatgaatgatcgtaaaagtcgtttctcaattaatggaaaacctatctaccatttcatgggaacctcaacattcagccagtatacagttgtacatgatgttagtgttgctaagattgacccaaaagctcctttggagaaggtttgcctccttggctgtggtgttcctactggtcttggagcagtttggaacactgcaaaagttgaagcagggtccattgttgctatttttggacttgggacagttggccttgcagttgcagagggtgcaaaaacagctggtgcttcacggattataggtatagatattgacagcaaaaagtttgatagagcaaaggattttggagttactgaatttgtgaatccaaaggaccacgataaaccaattcaacaggtgctcattgatctcactgatggtggtgttgactatagttttgagtgcatcggaaatgtttctgtaatgagggctgctttggagtgctgtcataaggcaagtatgcttgaattagtgggctggggaacctcggttattgtgggggttgcagcatctggccaggaaataagcactcgtcctttccagttagtgactggccgtgtttggaaaggaacagcttttggtggttttaagagccgttcacaggtgcctatgctcgtagacaagtacatgaaaaaggatgctaagttatcctatccactcttatcacaggaaattaaggttgatgagtacatcacccataatctgactcttccagagatgaaccaggcatttgatctgctgcatgaaggtagctgcctccggtgcgtgcttgatatgcaagtctaaggttaagtcccatggcgtttcatggcctgcctgccttattttatagggaatgcgatgtgctgtgctgtcggcctgtcgcc

SEQ ID NO: 431 - protein, 406 aa, Populus trichocarpa
MATQGQVITCRAAVAWEANKPLVIEEVQVAPPQAGEVRVKILFAALCHTDAYTWSGKDPEGLFPCILGHEAAGYAYHRHYPMIVESVGEGVTEVQPGDHVIPCYQAECRECKFCKSGKTNLCGKVRTATGVGVMMNDRKSRFSINGKPIYHFMGTSTFSQYTVVHDVSVAKIDPKAPLEKVCLLGCGVPTGLGAVWNTAKVEAGSIVAIFGLGTVGLAVAEGAKTAGASRIIGIDIDSKKFDRAKDFGVTEFVNPKDHDKPIQQVLIDLTDGGVDYSFECIGNVSVMRAALECCHKASMLELVGWGTSVIVGVAASGQEISTRPFQLVTGRVWKGTAFGGFKSRSQVPMLVDKYMKKDAKLSYPLLSQEIKVDEYITHNLTLPEMNQAFDLLHEGSCLRCVLDMQV

SEQ ID NO: 432 - DNA, 1235 bp, Populus trichocarpa
ggtttcttctgttgacttcactctccatccatggctactcagggacagcccatcacttgcaaagctgcggttgcttgggaggcgaacacgccgttggtaatagaggatgtgcaggtggctccaccacaggccggtgaggttcgaatcaggattctcttcactgctctttgccacactgatgcttacacttggagtggaaaggatcctgaaggtctcttcccatgtattcttggtcacgaggctgctgggattgtcgaaagcgttggtgaaggcgtgacagaggttcaaccaggtgatcatgttatcccttgctaccaggcggaatgccgagaatgcaagttttgcaaatcagggaagacaaacctttgtggaaaagttcgtgcagccactggtgttggagtcatgatgaatgatcgtaaaacccgattctcaattaaaggaaaacccatctaccattcagccagtacacagttgtgcatgatgttagcgttgctaagatcgacccagcagcccctttggagaaagtttgcctccttggctgcggtgttcctactggtaagtcttggagcagtttggaacactgcaaaagtagaagcagggtccattgttgctatttttggacttgggacgattggacttgcagtcgcggagggtgcaaaagcagctggagcttcacggataattggcatagatattgacagaaaaaagtttgatagagcaaaggatttcggagttactgaatttgtgaatccaaaggagcatgatgaaccaattcaacagcgtctcattgatctcactgatggtggtgttgactatagcttcgagtgtatcggaaatgtttctgtgatgagggctgctttggagtgctgtcacaagggctggggaacctccgtaattgtgggtgttgcagcatctggccaggagataagcactcgtcctttccagttggtgactggccgtgtttggaaaggaacagcttttggtggtttcaagagccgttcgcaggtgcctctgcttgtagaaaagtacatgaaaaaggaaattaagatcgatgagtacatcacccataaactgactcttggggagatgaatgaggcatttgatctgctgcacgaaggcagctgcctccggtgcgtgcttgatatgcaactctaaggctaaatccccagcccgcctgccatattttatagggaacacaatgttttgtaactttctttcttcttttcggttggaat

SEQ ID NO: 433 - protein, 374 aa, Populus trichocarpa
MATQGQPITCKAAVAWEANTPLVIEDVQVAPPQAGEVRIRILFTALCHTDAYTWSGKDPEGLFPCILGHEAAGIVESVGEGVTEVQPGDHVIPCYQAECRECKFCKSGKTNLCGKVRAATGVGVMMNDRKTRFSIKGKPIYHSASTQLCMMLALLRSTQQPLWRKFASLAAVFLLVSLGAVWNTAKVEAGSIVAIFGLGTIGLAVAEGAKAAGASRIIGIDIDRKKFDRAKDFGVTEFVNPKEHDEPIQQRLIDLTDGGVDYSFECIGNVSVMRAALECCHKGWGTSVIVGVAASGQEISTRPFQLVTGRVWKGTAFGGFKSRSQVPLLVEKYMKKEIKIDEYITHKLTLGEMNEAFDLLHEGSCLRCVLDMQL

SEQ ID NO: 434 - DNA, 1403 bp, Solanum lycopersicon
ggggatctatttgtagagtcatcctcaaaaacactatttttattttctttgattctgtggtctgtaaatcatggctacacaaggtcaagtcatcacctgcaaagctgcggtggcctgggaacccaacaagcccttggtgattgaggatgtgcaggtggctccaccgcaagccggtgaagtccgggttaaagttttgtatactgctctctgccacaccgatgcttatacctggagtggcaaggatcctgagggtctcttcccatgtgttcttggtcatgaggctgcggggatagtagaaagtgttggtgagggagtgactgaggttcagccaggagaccatgttataccttgctaccaggcagaatgcagagaatgcaagttctgcaaatcaggaaagaccaatctttgtggtaaagtaagggctgctactggagtgggagttatgatgaacgaccgtaagagtcgattttctatcaatggaaaaccgatctatcatttcatgggaacttcaaccttcagtcagtacactgttgtccatgatgttagtgttgcaaagattgacccagtagctcctctggagaaagtctgccttcttggatgtggtgttccaactggccttggagctgtttggaacactgcaaaagttgaaccaggttccattgttgccgtctttggcctgggaacagttggtcttgctgtggcggagggtgcaaaagctgctggtgcttcacgaattattggaattgatattgacagcaaaaagtttgatagagccaaaaattttggtgtgactgaattcattaatcccaaggagcatgagcaacccattcagcaagtcattgtggatcttactgatggtggtgttgattacagttttgagtgcataggaaatgtctctgttatgaggtctgctttagagtgttgtcacaagggttggggaacctcagtgattgtaggtgttgctgcttctggtcaggagatatctacacgtccatttcagctggtgactggtcgtgtttggaagggaactgcttttggtggtttcaaaagccgatcacaagttccttccctcgtggacaagtatttaaagaaggaaatcaaggtggatgaatacatcactcataacatgacacttgcggacataaacaaagctttcgacctgatgcatgacggggactgcctccgtgttgtcctggatatgtttgtatgaatgaagtctgtaggctctttatgttgcttactttctgtttttgtgctatttctcagagactatttacctttccccttgctaattatgtgttgaataaaaagaaagtgagaaaaaaaggatcaagatgacagatgaactctttttaaatggatggtagtttattaacttttcaagtgaaaaaaaaaaaaaaaaa

SEQ ID NO: 435 - protein, 379 aa, Solanum lycopersicon
MATQGQVITCKAAVAWEPNKPLVIEDVQVAPPQAGEVRVKVLYTALCHTDAYTWSGKDPEGLFPCVLGHEAAGIVESVGEGVTEVQPGDHVIPCYQAECRECKFCKSGKTNLCGKVRAATGVGVMMNDRKSRFSINGKPIYHFMGTSTFSQYTVVHDVSVAKIDPVAPLEKVCLLGCGVPTGLGAVWNTAKVEPGSIVAVFGLGTVGLAVAEGAKAAGASRIIGIDIDSKKFDRAKNFGVTEFINPKEHEQPIQQVIVDLTDGGVDYSFECIGNVSVMRSALECCHKGWGTSVIVGVAASGQEISTRPFQLVTGRVWKGTAFGGFKSRSQVPSLVDKYLKKEIKVDEYITHNMTLADINKAFDLMHDGDCLRVVLDMFV

SEQ ID NO: 436 - DNA, 1477 bp, Saccharum officinarum; identical to SEQ ID NO: 414

SEQ ID NO: 437 - protein, 381 aa, Saccharum officinarum; identical to SEQ ID NO: 415

SEQ ID NO: 438 - DNA, 1552 bp, Zea mays
ctccgccggctgctcttcttctcccctctcgctatatccccggggacctcacagccacatctctccactgctccgtccagcgcgtccacctcccaaacccctactcccccaggaagcaatggcttcccccacccagggccaggtcatcacctgcaaagcggcggtggcgtacgagccgaacaagccactcgtgatcgaggacgtgcaggtggcgccgccgcaggccggcgaggtccgcgtcaagatcctattcaccgcgctctgccacaccgaccactacacctggagcggcaaggatcctgagggtcttttcccttgcattcttggccacgaagctgccggaattgtggaaagtgtcggtgaaggagtaactgatgtgcagcctggggatcatgtcattccttgctaccaagcagaatgcaaagaatgcaagttttgcaagagcggaaagaccaacctctgtggtaaggtccggagtgccacaggcgtaggtgtcatgatgaatgatatgaagagcaggttctctgtaaatggaaagcccatttaccatttcatggggacatcaacattcagccagtacactgtggtgcatgatgtcagtgttgcaaagatcaacccacaggcacccttagataaagtctgcctgctcggttgtggtgttcctactggtcttggagcggtgtggaatactgcaaaggttgaatctggctcagttgttgctgtttttggccttggaacagttggacttgcagttgctgagggagcaaaagctgctggtgcttctcgagttattggcattgacatcgacaataaaaagtttgatgttgcaaagaactttggagttacagaatttgttaacccaaaagagcatgacaaaccgatacagcaggtcctggtcgatcttacagatggcggcgtggattacagctttgagtgcattggaaatgtttcggttatgagggctgcactggaatgctgccacaagggctggggaacctccgtcatcgtcggcgtcgccgcctctggccaggagatcgccacacgaccattccagctcgtgactgggcgtgtctggaagggaaccgctttcggtggcttcaagagccggacccaggtcccatggcttgttgacaagtacatgaaaaaggaaattaaggtggacgagtacattacgcacaacatgaacctggctgacatcaacgacgccttccacctgctgcacgaaggtggctgtctgcgttgtgtgctggcaatgcagatttgaaattcctaagctaagcagtttttgttttggaactagaactcctttttgcctcgttaggcctggacccgctgtataatgctatgttgtgttggatggctgacgatggttactgctgtgttgctagcaatgtggtacttgatctgtatcacggttgcaaataagtgctgtttctaaaacactccctctcggtgaataaggggttgtttggtttgaggaatcattccatccaaaatgaggtggtgcatcatagatctattcctcaaatttgctcggatgacttcaatcctt

SEQ ID NO: 439 - protein, 381 aa, Zea mays
MASPTQGQVITCKAAVAYEPNKPLVIEDVQVAPPQAGEVRVKILFTALCHTDHYTWSGKDPEGLFPCILGHEAAGIVESVGEGVTDVQPGDHVIPCYQAECKECKFCKSGKTNLCGKVRSATGVGVMMNDMKSRFSVNGKPIYHFMGTSTFSQYTVVHDVSVAKINPQAPLDKVCLLGCGVPTGLGAVWNTAKVESGSVVAVFGLGTVGLAVAEGAKAAGASRVIGIDIDNKKFDVAKNFGVTEFVNPKEHDKPIQQVLVDLTDGGVDYSFECIGNVSVMRAALECCHKGWGTSVIVGVAASGQEIATRPFQLVTGRVWKGTAFGGFKSRTQVPWLVDKYMKKEIKVDEYITHNMNLADINDAFHLLHEGGCLRCVLAMQI

SEQ ID NO: 440 - DNA, 1230 bp, Arabidopsis thaliana
cacaaaactaacaaaagatcaaaagcaagttcttcactgttgataatgtctaccaccggacagattattcgatgcaaagctgctgtggcatgggaagccggaaagccactggtgatcgaggaagtggaggttgctccaccgcagaaacacgaagttcgtatcaagattctcttcacttctctctgtcacaccgatgtttacttctgggaagctaagggacaaacaccgttgtttccacgtatcttcggccatgaagctggagggattgttgagagtgttggagaaggagtgactgatcttcagccaggagatcatgtgttgccgatctttaccggagaatgtggggagtgtcgtcattgccactcggaggaatcaaacatgtgtgatcttctcaggatcaacaccgagcgaggagggatgattcacgatggtgaatcaagattctccattaatggcaaaccaatttaccatttccttgggacttccacgttcagtgagtacacagtggttcactctggtcaggttgctaagatcaatccggatgctcctcttgacaaggtctgtattgtcagttgtggtttgtctactgggttaggagcaactttgaatgtggctaaacccaagaaaggtcaaagtgttgccatttttggtcttggtgctgttggtttaggcgctgcagaaggtgctagaatcgctggtgcttctaggatcatcggtgttgattttaactctaaaagattcgaccaagctaaggaattcggtgtgaccgagtgtgtgaacccgaaagaccatgacaagccaattcaacaggtgatcgctgagatgacggatggtggggtggacaggagtgtggaatgcaccggaagcgttcaggccatgattcaagcatttgaatgtgtccacgatggctggggtgttgcagtgctggtgggtgtgccaagcaaagacgatgccttcaagactcatccgatgaatttcttgaatgagaggactcttaagggtactttcttcgggaactacaaacccaaaactgacattcccggggttgtggaaaagtacatgaacaaggagctggagcttgagaaattcatcactcacacagtgccattctcggaaatcaacaaggcctttgattacatgctgaagggagagagtattcgttgcatcatcaccatgggtgcttgaagccattctctcgcagatgatgttcactttgtgttttacttcctt

SEQ ID NO: 441 - protein, 379 aa, Arabidopsis thaliana
MSTTGQIIRCKAAVAWEAGKPLVIEEVEVAPPQKHEVRIKILFTSLCHTDVYFWEAKGQTPLFPRIFGHEAGGIVESVGEGVTDLQPGDHVLPIFTGECGECRHCHSEESNMCDLLRINTERGGMIHDGESRFSINGKPIYHFLGTSTFSEYTVVHSGQVAKINPDAPLDKVCIVSCGLSTGLGATLNVAKPKKGQSVAIFGLGAVGLGAAEGARIAGASRIIGVDFNSKRFDQAKEFGVTECVNPKDHDKPIQQVIAEMTDGGVDRSVECTGSVQAMIQAFECVHDGWGVAVLVGVPSKDDAFKTHPMNFLNERTLKGTFFGNYKPKTDIPGVVEKYMNKELELEKFITHTVPFSEINKAFDYMLKGESIRCIITMGA

SEQ ID NO: 442 - protein, 130 aa, Artificial sequence
  domain 1
AGEVRVKILFTALCHTDHYTWSGKDPEGLFPCILGHEAAGVVESVGEGVTEVQPGDHVIPCYQAECKECKFCKSGKTNLCGKVRGATGVGVMMNDMKSRFSVNGKPIYHFTGTSTFSQYTVVHDVSVAKI

SEQ ID NO: 443 - protein, 143 aa, Artificial sequence
  domain 2
AGSIVAVFGLGTVGLAVAEGAKAAGASRIIGIDIDNKKFDVAKNFGVTEFVNPKDHDKPIQQVLVDLTDGGVDYSFECIGNVSVMRAALECCHKDWGTSVIVGVAASGQEIATRPFQLVTGRVWKGTAFGGFKSRTQVPWLVD

SEQ ID NO: 444 - protein, 10 aa, Artificial sequence
  domain 3
VDKYMNKEVK

SEQ ID NO: 445 - protein, 9 aa, Artificial sequence
  motif 20
HYTWSGKDP

SEQ ID NO: 446 - protein, 8 aa, Artificial sequence
  motif 21
PCYQAECK

SEQ ID NO: 447 - protein, 21 aa, Artificial sequence
  motif 22
GKTNLCGKVRGATGVGVMMND

SEQ ID NO: 448 - protein, 44 aa, Artificial sequence
  motif 23
YHFMGTSTFSQYTVVHDVSVAKINPQAPLDKVCLLGCGVPTGLG

SEQ ID NO: 449 - protein, 27 aa, Artificial sequence
  motif 24
WNTAKVEAGSIVAVFGLGTVGLAVAEG

SEQ ID NO: 450 - protein, 28 aa, Artificial sequence
  motif 25
GASRIIGIDIDNKKFDVAKNFGVTEFVN

SEQ ID NO: 451 - protein, 16 aa, Artificial sequence
  motif 26
KDHDKPIQLVLVDIAD

SEQ ID NO: 452 - protein, 9 aa, Artificial sequence
  motif 27
SVRRAAEEC

SEQ ID NO: 453 - protein, 37 aa, Artificial sequence
  motif 28
WGTSVIVGVAASGQEIATRPFQLVTGRVWKGTAFGGF

SEQ ID NO: 454 - protein, 8 aa, Artificial sequence
  motif 29
KVDEYITH

SEQ ID NO: 455 - protein, 13 aa, Artificial sequence
  motif 30
MLKGESIRCIITM

SEQ ID NO: 456 - DNA, 1300 bp, Oryza sativa
ttcttctgaagctgaagccctgcgaaataggcctttaaacgctttaaggttactggatgatcatatcggcgtaagaccggtttaaacatggtttcgctttgtgaatccaatgtgagtcacgacgtgacacatggcacgtccttggagctttagacatatcgaatctgagcactggagtggccgagtgggtgagcggccaaatccgttttagacagatcgcactgacacgatgttgatcattgatactaataccattttatcaagcagtagtgttgaaaaaaaaacttatgttctcttcaactgtgagatttcatcccgtttcaagatgaacaagccatgcatgtgagatgtgaacagaaggcagaagacagtggaaagacaggacaaataagtgaagagggatcaaatcaatgggcctgacggtttctgaaagttgacatggaaatcgccggtgatcaccggtttatacgttatttaaatctgcgatttccactttcgtttgctttcggggttccgatttgagtcacgcacatattcttcatcgtgctttggatctcagcaccgtagtaacttttggacaaattgcattcgccgacactaataacatgttctctttatgctgctttacatatactgcttatccacacccaatcccatgttcatatattatgagatggagggagtaaactttgttaacagcaacattttttatattaaagcatcaactaattaaagcacaagatacgcatgttatctcaataaatcttccagtgcatgtataaagaagatgtcgccgctaacttagataatttttgtgacctttatcctggccggcataattaattcttccggaaattaaaagctagtttttccatattcatcagtacagacaagacagcatagtaagcgaagcatacctgacgtgttagctcattgtaactcgatctggaacactcgatgctagacacagacagacactcctcgtgatgaacgttagcatttagcaacatacggtgataaagcagctggggatcgatccatccatccatcgtctttacacgtacttaccttgctaaccgcactgtcgactcttgcatgtttgcatgtaatccaaatggaccccacgtggaacatgctcacagtgctttgcagctgctttccaaaatgctttctttcacttcttccattcctctgtccacaaaaaaagtagtgtgttcttgagcctatataagagagggtcacacgctccagtcgactcaccatcgatccatctgacggttagttccaagggaaagaagaa

SEQ ID NO: 457 - DNA, 50 bp, Artificial sequence
  primer: prm08126
ggggacaagtttgtacaaaaaagcaggcttaaacaatggcttcccccacc

SEQ ID NO: 458 - DNA, 49 bp, Artificial sequence
  primer: prm08127
ggggaccactttgtacaagaaagctgggtgacatatatgcaaacggctt

SEQ ID NO: 459 - DNA, 1464 bp, Triticum aestivum
atggacggcctcgcggcgccctcaccctcccactccggcgccacgtcgggcggcggcgcctcccaccgcaagcggaagcttccgccaccatccctctctgacgccaccgccgacgaggacgacgacaccacggcgccgtcgtcccccgcctcctcctcctcccttaccaccttcaccgccgctcgcctcgatgccgcacctgcatcctcatccggcaggcctccgaagcccgactcgtcgtccgcatctgccgtcacagcggcggctcctaagcccgatgccgcgtccgcggcggctggagacgggaaggaggactccaaggggctgttcacggacaatatccagactagtggcgcttacagcgcccgcgaggagggtctcaagcgtgaggaagatacagggaagctgaaatttctctgttattctaacgatggagtcgacgaacatatgatctggttggtaggtttgaagaatatctttgcacggcagctccctaatatgcccaaggagtatatagtccgacttgttatggatagaactcacaagtcaatgatggttatcaggaataataatgttgtaggaggcattacttaccgcccttatgcaagccagaggttcggagaaatagcattttgtgcaattacagctgatgaacaagttaaaggctacggaacaaggctaatgaatcatctgaagcaacatgcccgagatgctgatggcctcactcatttcttaacttatgcagataacaatgctgttggttatttggtaaagcagggtttcacaaaggagatcacattcgacaaagaaagatggcaggggtacatcaaggactatgatggaggaatactgatggagtgcaaaattgatcaaaagcttccgtatgttgatctagcaacaatgattcggcgccaaagacaggcgattgatgagaagatcagagagctttctaactgtcatattgtttattcaggaattgattttcaaaagaaagaagctggtattccaagaagactgatgaaaccagaagatatccctgggttgagggaagctgggtggactcctgaccagtgggggcattccaaatcacgttcaacattttcctcggattataacacttacagacagcagcttactagccttatgcggatgttgttgaagagtttggtcgatcatgccgatgcttggccattcaaagagccggtggattcacgtgatgttccagattattatgatattatcaaagatcctattgatttgaagacaatgaccagaagagttgagtcggagcagtattatgtgaccttagagatgtttgtagccgacttaaagagaatgttcattaatgcgagaacctacaactctcctgatacgatctatttcaaatgctccacacggctcgaggcctacttcacaaatagaatccaatctcaccttgcccaggctgcgtcaaccaagaactag

SEQ ID NO: 460 - protein, 487 aa, Triticum aestivum
MDGLAAPSPSHSGATSGGGASHRKRKLPPPSLSDATADEDDDTTAPSSPASSSSLTTFTAARLDAAPASSSGRPPKPDSSSASAVTAAAPKPDAASAAAGDGKEDSKGLFTDNIQTSGAYSAREEGLKREEDTGKLKFLCYSNDGVDEHMIWLVGLKNIFARQLPNMPKEYIVRLVMDRTHKSMMVIRNNNVVGGITYRPYASQRFGEIAFCAITADEQVKGYGTRLMNHLKQHARDADGLTHFLTYADNNAVGYLVKQGFTKEITFDKERWQGYIKDYDGGILMECKIDQKLPYVDLATMIRRQRQAIDEKIRELSNCHIVYSGIDFQKKEAGIPRRLMKPEDIPGLREAGWTPDQWGHSKSRSTFSSDYNTYRQQLTSLMRMLLKSLVDHADAWPFKEPVDSRDVPDYYDIIKDPIDLKTMTRRVESEQYYVTLEMFVADLKRMFINARTYNSPDTIYFKCSTRLEAYFTNRIQSHLAQAASTKN

SEQ ID NO: 461 - DNA, 1509 bp, Hordeum vulgare
atggatggcctcacggcgccctcaccctcccactccggcgccacctcgggcggcggcgcctcccaccgcaagcggaagcttccgccgccatccctatctgatgccaccgccgacgaggacgacgacaccaccgcgccgtcgtcccccgccacctccctatcctcgccctcccgcccgtcgtctccgtcctcctcccattctgacgaggatgacgacgactcccttaccaccttcaccgccgctcgcctcgataccgcacctgcatcctcctccgccaggcctcccaagcccgactcttcatccgcatctgcggtcacaacggcggctcccaagcccgatgccgcgtccgcggcgtctggagacgggaaggaggactccaaggggctgttcacggacaatatccagaccagtggcgcctacagcgcccgggaggagggtctcaagcgtgaggaagatacagggaagctgaaatttctctgttattctaacgatggagttgatgaacatatgatttggctggtaggtttgaagaatatctttgcacggcagctccctaatatgcccaaggagtatatagtccgacttgttatggatagaactcataagtcaatgatggttatcagaaataataatgttgtaggaggcattacttaccgcccttatgcaagccagaggttcggagaaatagcattttgtgcaattacagctgatgaacaagttaaaggctatggaacaaggctaatgaatcatctgaagcaacatgcccgagatgctgatggtctcactcatttcttaacttatgcagataacaatgctgttggttattttgtaaagcagggtttcacaaaggagatcacattcgacaaagaaagatggcaggggtacatcaaggactatgatggaggaatattgatggagtgcaaaattgatcaaaagcttccgtatgttgatctagcaacaatgattcggcgtcaaagacagatcagagagctttctaactgccatattgtttattcaggaattgattttcaaaagaaagaagctggtatcccaagaagactgatgaaaccagaagatatccctgggttgagggaagctgggtggactcctgaccagtgggggcattccaaatcacgttcaacattttcctcggactatagcacttacagacagcagcttactagccttatgcggatgttgttgaagagtttggtcgatcatgctgatgcttggccattcaaagagccggtggattcacgtgatgtcccagattattatgatattatcaaagatcctattgatttgaagacaatgtccagaagagtcgagtcggagcagtattatgtgaccttagagatgtttgtagccgacttaaagagaatgttcattaatgcgagaacctacaactctcctgatactatctatttcaaatgctccacacggctcgaggcctacttcacgaatagaatccaatctcaccttgcccaggccgcgtcaaccaagaactag

SEQ ID NO: 462 - protein, 502 aa, Hordeum vulgare
MDGLTAPSPSHSGATSGGGASHRKRKLPPPSLSDATADEDDDTTAPSSPATSLSSPSRPSSPSSSHSDEDDDDSLTTFTAARLDTAPASSSARPPKPDSSSASAVTTAAPKPDAASAASGDGKEDSKGLFTDNIQTSGAYSAREEGLKREEDTGKLKFLCYSNDGVDEHMIWLVGLKNIFARQLPNMPKEYIVRLVMDRTHKSMMVIRNNNVVGGITYRPYASQRFGEIAFCAITADEQVKGYGTRLMNHLKQHARDADGLTHFLTYADNNAVGYFVKQGFTKEITFDKERWQGYIKDYDGGILMECKIDQKLPYVDLATMIRRQRQIRELSNCHIVYSGIDFQKKEAGIPRRLMKPEDIPGLREAGWTPDQWGHSKSRSTFSSDYSTYRQQLTSLMRMLLKSLVDHADAWPFKEPVDSRDVPDYYDIIKDPIDLKTMSRRVESEQYYVTLEMFVADLKRMFINARTYNSPDTIYFKCSTRLEAYFTNRIQSHLAQAASTKN

SEQ ID NO: 463 - DNA, 1536 bp, Oryza sativa
atggacgggctcgcggcgccctcgccgtcccactccggcgcgacgtccggcggcggcgcctcccaccgcaagcggaagctcccgccgtcgtccctctccgacgccaccgccgacgaggacgacgacaccaccgcgccgtcgtcgccgtccacctccccgtcgtcgccctcacgcccgtcctccccgtcctcctcccactccgacgatgacgacgacgactccctccacaccttcaccgccgcccgcctcgacggcgcgcccccgtcctcatccggccgcccgccgaagcccgagtcctcgaccgtgtctgccgccgccgcggccgcggctgcagcggccgctcccaagcccgattccgcttccgctgccgccggcgacggcaaggaggacccgaaggggttgttcactgacaacattcagaccagtggcgcgtatagcgctcgagaggagggcctcaagcgtgaggaagaagcagggaggctgaaatttctatgctattctaatgatggagttgatgaacatatgatttggttggtaggcttgaagaatatctttgctcggcagcttcctaacatgcccaaagagtacattgtccgtcttgttatggatagaactcacaaatcaatgatggttatcaggaataatattgttgtaggaggcattacttaccggccttatacaagccagaagtttggagaaatagcattttgtgcaattacagctgatgagcaagttaaaggctatgggacacggttaatgaatcacctgaagcaacatgcccgagatgctgatgggctcactcatttcttaacttatgcagataacaatgccgttggctattttgtaaagcagggtttcacaaaggagatcacattggacaaagaaagatggcaagggtacattaaagactatgatggaggaatattgatggagtgcagaattgatcaaaagttgccatatgttgatctggcaacgatgattaggcgtcaaagacaggcaattgatgagaaaatcagagagctttcaaactgccatattgtttattctggaattgacttccaaaagaaagaagctggtattccaagaagaacgatgaaaccagaagacatccaaggcttgagggaagctgggtggacgccagatcagtgggggcattccaaatcaagatcagccttttctcctgattacagtacttacaggcaacaacttactaatctaatgcgttcattgttgaagaatatgaatgagcatcctgatgcttggccattcaaagagccagtggattcacgtgatgttcctgactattatgacattatcaaagatcctattgatttgaagacaatgtcaaaaagagttgagtctgagcagtattatgtgacgctagagatgtttgtagctgacatgaagagaatgttcagcaatgcaaaaacttataactctcccgatacaatctattacaagtgtgcctcacggctcgagagcttcttctcaaacaaagtagcatctcagcttgcccaagcctcaacgaagaactga

SEQ ID NO: 464 - protein, 511 aa, Oryza sativa
MDGLAAPSPSHSGATSGGGASHRKRKLPPSSLSDATADEDDDTTAPSSPSTSPSSPSRPSSPSSSHSDDDDDDSLHTFTAARLDGAPPSSSGRPPKPESSTVSAAAAAAAAAAAPKPDSASAAAGDGKEDPKGLFTDNIQTSGAYSAREEGLKREEEAGRLKFLCYSNDGVDEHMIWLVGLKNIFARQLPNMPKEYIVRLVMDRTHKSMMVIRNNIVVGGITYRPYTSQKFGEIAFCAITADEQVKGYGTRLMNHLKQHARDADGLTHFLTYADNNAVGYFVKQGFTKEITLDKERWQGYIKDYDGGILMECRIDQKLPYVDLATMIRRQRQAIDEKIRELSNCHIVYSGIDFQKKEAGIPRRTMKPEDIQGLREAGWTPDQWGHSKSRSAFSPDYSTYRQQLTNLMRSLLKNMNEHPDAWPFKEPVDSRDVPDYYDIIKDPIDLKTMSKRVESEQYYVTLEMFVADMKRMFSNAKTYNSPDTIYYKCASRLESFFSNKVASQLAQASTKN

SEQ ID NO: 465 - DNA, 1548 bp, Sorghum bicolor
atggacggcctcgcggcaccgtcgccgtcccactccggcgccacctccggcggcggggcctcccaccgcaagcggaagctcccgccgtcgtcgctttccgacgccaccgccgacgaggacgacgacaccaccgctccgtcatccccctccacggccccatcctcgccctcccgcccttcctctccatcttcctcacactccgacgatgacgaggacgactcgctccacacgttcaatgccgcgcgccttgacggcgcgccgggtgggggctccgcctccggccgtcctccgaagccggattcctcatcagtgtctgctgcgtcggccgccgccgcggctgcggcgggcggaggacccaagctggagcctggctcggcgaccgccggcgacgggaaggaggacccgaagggattgttcacggacaacctccagaccagcggcgcttacagcgcccgtgaggagggcctcaaacgcgaggaagattcgggaaggctgaaatttctctgttattctaacgatggtgttgatgaacacatgatatggttagtaggtttgaagaatatcttcgctcggcagcttccaaatatgcccaaagaatatattgtgcgccttgtcatggatagaactcacaagtcaatgatggttatcaggaacaatattgtcgtgggaggcattacttatcgcccttatgcaagccagaggtttggagaaatagcgttttgtgctatcacagctgatgagcaagttaaaggctatggaacaagattaatgaatcatttgaagcaacatgcacgggatgctgatgggctcacacatttcttaacctatgctgataataatgctgttggctattttgtaaagcagggtttcacaaaggagatcacattggacaaagaaagatggcaagggtacattaaagactatgacggaggaatattgatgcagtgtaaaattgacccaaagctgccatatgttgatctggcaacaatgattcgacgtcaaaggcaggccattgatgagaagatcagagacctttctaactgccatattgtttatcccggaattgatttccagaagaaagaagctggcattccaagaagactgataaagccagaagatatccctggtcttagggaagctgggtggacgcctgatcagtggggtcactctaaatcacgatcagcgttctccccggactataatacttacagacaacaacttgctaaccttatgcggacattgttgaagaatctgagtgaacatcctgatgcttggccatttaaagagcctgtggattcacgagatgttccagactattatgatatcataaaagatcctattgatttaaagacgatgttaagaagagttgactctgagcaatattatgtgaccctagagatgtttgtagccgacatgaagagaatgttcagcaatgcaagaacttacaattctccagatactatctattacaaatgcgcaacacggcttgaaaatttcttctcaaccaaaattgcttcactggtttcacaagcctcaaccaagagctag

SEQ ID NO: 466 - protein, 515 aa, Sorghum bicolor
MDGLAAPSPSHSGATSGGGASHRKRKLPPSSLSDATADEDDDTTAPSSPSTAPSSPSRPSSPSSSHSDDDEDDSLHTFNAARLDGAPGGGSASGRPPKPDSSSVSAASAAAAAAAGGGPKLEPGSATAGDGKEDPKGLFTDNLQTSGAYSAREEGLKREEDSGRLKFLCYSNDGVDEHMIWLVGLKNIFARQLPNMPKEYIVRLVMDRTHKSMMVIRNNIVVGGITYRPYASQRFGEIAFCAITADEQVKGYGTRLMNHLKQHARDADGLTHFLTYADNNAVGYFVKQGFTKEITLDKERWQGYIKDYDGGILMQCKIDPKLPYVDLATMIRRQRQAIDEKIRDLSNCHIVYPGIDFQKKEAGIPRRLIKPEDIPGLREAGWTPDQWGHSKSRSAFSPDYNTYRQQLANLMRTLLKNLSEHPDAWPFKEPVDSRDVPDYYDIIKDPIDLKTMLRRVDSEQYYVTLEMFVADMKRMFSNARTYNSPDTIYYKCATRLENFFSTKIASLVSQASTKS

SEQ ID NO: 467 - DNA, 1548 bp, Zea mays
atggacggcctcgtggcgccgtcgccatcccactccggcgccacctccggcggcggggcctcccaccgcaagcggaagctcccgccgtcgtcgctctccgacgccaccggcgacgaggacgacgacaccaccgctccgtcatccccctccacggccccatcctcgccctctcgcccgtcatctccatcttcttcgcactccgacgatgacgacgacgactcgctccacacgttcaatgccgcgcgcctcgacggcgcgccgagtgggggctctgcgtccggccgtcctcctaagccggattcctcatcagtgtctgctgctgcggcggcagccgcggctgcggtgggtggaggacctaagccggagcccggctcggcgaacgccggcgacgggaaggaggacacaaaggggctgttcacggacaacctccagaccagcggcgcgtacagcgcccgtgaggagggcctcaagcgcgaggaagattcaggaaggctgaagtttctctgttattctaatgacggcgttgatgaacacatgatatggttggtagggttgaagaatatcttcgcccgacagcttcctaatatgcccaaagaatatattgtacgccttgtcatggatagaactcacaagtcaatgatggttatcaggaacaatattgtcgtggggggcattacttatcgcccttatgcaagccagagatttggagaaatagcgttttgtgctatcacagctgatgagcaagttaaaggctatggaacaagattaatgaatcatttgaaacaacatgcacgggatgctgatgggctcacacatttcttaacctatgctgataacaatgctgttggctattttgtaaagcagggtttcacaaaggagatcacattggacaaagaaagatggcaagggtacattaaagattatgacggaggaatattgatggagtgtaaaattgacccaaagctgccatatgttgatgtggcaacaatgattcgacgtcaaaggcaggccattgatgagaagatcagagagctttctaactgccatattgtttattcaggaattgattttcaaaagaaagaagctggcattccaagaagactgataaagccagaagatatccctggtctcagggaagctgggtggacgcctgatcaattggggcattctaaatcacgatcatcattctccccggactataatacttacaggcaacagcttactacccttatgcagacagcgctgaagaatctgaatgaacatcctgatgcttggccattcaaagagcctgtggattcacgggatgttccagactattatgatatcatcaaagatcctattgatttaagaacaatgttaagaagagtcgactcggaacaatattatgtgaccctagagatgtttgtagccgacatgaagagaatgttcagcaatgcaagaacttacaattctccagatactatctattacaaatgtgcgacacggcttgaaaacttcttctcgggcagaattactgtactgcttgcacaactctcaaccaagagctag

SEQ ID NO: 468 - protein, 515 aa, Zea mays
MDGLVAPSPSHSGATSGGGASHRKRKLPPSSLSDATGDEDDDTTAPSSPSTAPSSPSRPSSPSSSHSDDDDDDSLHTFNAARLDGAPSGGSASGRPPKPDSSSVSAAAAAAAAAVGGGPKPEPGSANAGDGKEDTKGLFTDNLQTSGAYSAREEGLKREEDSGRLKFLCYSNDGVDEHMIWLVGLKNIFARQLPNMPKEYIVRLVMDRTHKSMMVIRNNIVVGGITYRPYASQRFGEIAFCAITADEQVKGYGTRLMNHLKQHARDADGLTHFLTYADNNAVGYFVKQGFTKEITLDKERWQGYIKDYDGGILMECKIDPKLPYVDVATMIRRQRQAIDEKIRELSNCHIVYSGIDFQKKEAGIPRRLIKPEDIPGLREAGWTPDQLGHSKSRSSFSPDYNTYRQQLTTLMQTALKNLNEHPDAWPFKEPVDSRDVPDYYDIIKDPIDLRTMLRRVDSEQYYVTLEMFVADMKRMFSNARTYNSPDTIYYKCATRLENFFSGRITVLLAQLSTKS

SEQ ID NO: 469 - DNA, 1707 bp, Arabidopsis thaliana
atggactctcacttttcccacctcaacgccgccaatcgttcccgcagttctcagactccttctccttctcattccgcctccgcctccgtcacttcttctctccacaaacgcaaactcgccgccaccacggcagcgaatgcagccgcttctgaagatcacgcccctccttcttcctctttccctccttcctccttctctgccgatactcgcgacggcgctttaacctccaacgatgaactcgagagcatctccgctcgcggcgccgatacagattcagatcctgatgaatcagaggatatagtcgtggatgatgacgaggacgaatttgctcctgaacaggaccaggactcttctatccgcacattcaccgccgctcgactcgattccagctctggagtcaacggttcgagtcgcaacactaaacttaagacggaaagctccacggtgaagcttgagagctctgatggtggaaaagatggtggatcatctgtggttgggactggtgtgagtggcactgttggaggaagctcaatctcagggctcgtgccaaaggatgagtctgttaaggtattggctgagaatttccagactagcggagcttacattgccagagaagaggctttgaaaagagaggagcaagcaggacgactcaaatttgtttgttactcaaatgattccattgatgagcatatgatgtgcttgattgggttgaagaacatttttgcaagacagttacctaatatgcccaaggagtacattgttcgtcttctgatggataggaaacataagtctgttatggtactaagagggaatctagttgtaggtggtatcacgtatcgtccatatcacagtcagaagtttggggaaatagcattttgtgcaatcacagcagatgaacaagtaaaaggttacggtaccagattgatgaaccacttgaaacaacatgcacgtgatgttgatggattgacgcattttcttacttatgctgacaacaatgctgttggttacttcgtcaagcagggttttactaaagagatttacttggagaaagatgtatggcatgggttcattaaagactatgatggtggtctccttatggaatgcaaaattgatccaaagctgtcatatacggatttgtcaagcatgatacgccagcaaagaaaggcaattgatgaaaggataagagagttatcaaactgtcagaatgtgtatccaaaaattgagtttctaaagaatgaagctggaattcctagaaagattatcaaagttgaggaaatacgtggcttaagggaagctggttggaccccagatcagtgggggcacactcgtttcaaattattcaatggttctgctgatatggtgacaaatcaaaaacagttgaatgcactcatgcgtgcgcttttaaagacaatgcaagaccatgctgatgcttggcctttcaaagaaccagtggattctcgcgatgtccctgattactatgacatcattaaggatcccattgatctgaaggtaattgcaaagagggtagagtcggaacagtattacgtgacattggatatgtttgttgcggatgcgagacggatgtttaacaattgtagaacttacaactcccccgataccatttattacaaatgtgcaaccaggttggaaacacacttccatagcaaagtacaagcaggtctccaatctggtgctaaatctcaatag

SEQ ID NO: 470 - protein, 568 aa, Arabidopsis thaliana
MDSHFSHLNAANRSRSSQTPSPSHSASASVTSSLHKRKLAATTAANAAASEDHAPPSSSFPPSSFSADTRDGALTSNDELESISARGADTDSDPDESEDIVVDDDEDEFAPEQDQDSSIRTFTAARLDSSSGVNGSSRNTKLKTESSTVKLESSDGGKDGGSSVVGTGVSGTVGGSSISGLVPKDESVKVLAENFQTSGAYIAREEALKREEQAGRLKFVCYSNDSIDEHMMCLIGLKNIFARQLPNMPKEYIVRLLMDRKHKSVMVLRGNLVVGGITYRPYHSQKFGEIAFCAITADEQVKGYGTRLMNHLKQHARDVDGLTHFLTYADNNAVGYFVKQGFTKEIYLEKDVWHGFIKDYDGGLLMECKIDPKLSYTDLSSMIRQQRKAIDERIRELSNCQNVYPKIEFLKNEAGIPRKIIKVEEIRGLREAGWTPDQWGHTRFKLFNGSADMVTNQKQLNALMRALLKTMQDHADAWPFKEPVDSRDVPDYYDIIKDPIDLKVIAKRVESEQYYVTLDMFVADARRMFNNCRTYNSPDTIYYKCATRLETHFHSKVQAGLQSGAKSQ

SEQ ID NO: 471 - DNA, 1632 bp, Glycine max
atggatttccacggcggaggaccactccgttcccgcagttcccagtccccttctccctctcactccgcctccgcctccgccacctcctccatccacaagcgcaagctcgtgtccgaggaccacgcgcctcccttccccccctcctccttctccgccgacacccgcgacggtgccctcacctccaacgacgacctcgagagcatctccgcccgcggcgccgactccgactccgactccgaatccgaggacgccgtcgtcgacgacgacgaggacgactacgacaacgacaacgacaacgactcctccatgcgcaccttcaccgcctccaggctcagcaaccctccctccgctccccgcaacaccaagctcaagaccgaaaactccaccgtcaaaattgagaattctgacggcgccaaagacgccggagccgtcggatctggcgccgccgccgccgcgggaccggtccccgggattgtggttaaggaggacccgactaagatttttactgataatttgcaaaccagtggggcttacactgccagggaggagagtctcaagaaagaggaggaagcaggaaagctcaaatttgtatgcctttcaaacgatggtgttgatgaacatatggtttggttgattggattgaagaatatatttgctaggcaacttcccaatatgcccaaggagtacattgtccgacttgttatggataggagccataagtctgtaatggttataaggcgcaatcacgttgttggaggcattacatatcgcccatatgctagccagaggttcggtgagatagccttttgtgcaattacagctgatgagcaagtaaagggttatggtacccgattgatgaatcacttaaaacagtttgcacgtgatatggatgggctgacacatttcctcacatatgctgacaataatgctgttggctattttatcaaacagggatttacaaaagagattcacttggagaaagatcgatggcaaggttatataaaggattacgatggaggaattctcatggaatgcaagattgatccaaagctcccttacactgatttgtcaactatgatccgtcgtcaaaggcaggcaattgatgaaaaaatcagagagctgtcaaactgtcacatcgtttatgctggaattgattttcagaagaaagaagctggtattcctaaaaaaattattgatgacatccctggtttgagagaggctgggtggactcctgatcagtggggtcattcacgattcagaactttaaatgtttcttctgacaatgctactaatcaaaaacatttgaatgggtttatgcgttcacttctaaagtcaatgttcgatcacgctgatgcttggccattcaaggaaccagttgatgcacgggatgtccctgattattatgacatcatcaaagatccaatggatttgaagacaatgtctaagagggtggattcagagcaatattatgtaacatttgagatgtttgttgcggatgccagaagaatgtttgcgaatgcacgcacctataattctccagaaaccatttattacaaatgttctacaaggttagaagcccactttcaaagcaaagtgcaagcaggcctccagcctggtaccaaaattcagtag

SEQ ID NO: 472 - protein, 543 aa, Glycine max
MDFHGGGPLRSRSSQSPSPSHSASASATSSIHKRKLVSEDHAPPFPPSSFSADTRDGALTSNDDLESISARGADSDSDSESEDAVVDDDEDDYDNDNDNDSSMRTFTASRLSNPPSAPRNTKLKTENSTVKIENSDGAKDAGAVGSGAAAAAGPVPGIVVKEDPTKIFTDNLQTSGAYTAREESLKKEEEAGKLKFVCLSNDGVDEHMVWLIGLKNIFARQLPNMPKEYIVRLVMDRSHKSVMVIRRNHVVGGITYRPYASQRFGEIAFCAITADEQVKGYGTRLMNHLKQFARDMDGLTHFLTYADNNAVGYFIKQGFTKEIHLEKDRWQGYIKDYDGGILMECKIDPKLPYTDLSTMIRRQRQAIDEKIRELSNCHIVYAGIDFQKKEAGIPKKIIDDIPGLREAGWTPDQWGHSRFRTLNVSSDNATNQKHLNGFMRSLLKSMFDHADAWPFKEPVDARDVPDYYDIIKDPMDLKTMSKRVDSEQYYVTFEMFVADARRMFANARTYNSPETIYYKCSTRLEAHFQSKVQAGLQPGTKIQ

SEQ ID NO: 473 - DNA, 1623 bp, Glycine max
atggagtcccacggcggaggacccctccgttcccgcagctcccagtccccttctccctcccactccgcctccgcctccgccacctcctccatccacaagcgcaagctcgcgtctgaggaccacgcgcctcccttccctccgtcctccttctccgccgacacccgcgacggcgccctcacctccaacgacgacctcgagagcatctccgcccgcggcgccgactccgactccgacgatgactccgaggacgccgtcgtcgacgacgacgaggacgactacggcaacgacaacgactcctccattcggaccttcaccgcctccaggctcagcaaccctccctccgctccccgcaacaccaagctcaagaccgaaatctccaccgtcaaaattgagaattctgacggcgccaaagacgccgtagtcggagcttgtgccgccgcttccgcgggatcggtccccgggattgtggttaaggaggacccgactaagatttttactgataatttgcaaacgagtggggcttacactgccagggaagagagtctcaagaaagaggaggaagcaggaaggctcaaatttgtatgcctatcaaacgatggtgttgatgagcatatggtttggttgattggattgaagaatatatttgctaggcagcttcccaatatgcccaaggagtacattgtccgacttgttatggataggagccataagtctgtaatggttataaggcgtaatcatgttgttggaggcattacatatcgcccatatgctagtcagaagtttggtgagatagccttttgtgcaattacagctgatgagcaagtaaagggttatggtaccagattgatgaatcacttaaaacaatatgcacgggatatggatgggctgacacattttctcacatacgctgacaataatgctgttggctattttatcaagcagggatttacaaaagagattcacttggagaaagatcgatggcaaggttatataaaggattatgatggaggaattctcatggaatgcaagattgatccaaaactcccgtacactgatttgtcaactatgatccgtcgtcaaaggcaggcaattgatgaaaaaatcagagagctatcaaactgtcacatcgtttatgctggaattgattttcagaagaaagaagctggtattcctaaaaaaattattgatgacatccctggtttgagagaggctggatggactcctgatcagtggggtcattcacgattcagaactttaaatgtttctactgacaatgctactaatcagaaacatttgaatgggtttatgcgttcacttctaaagtcaatgttcgatcatgctgatgcttggccattcaaggagccagttgatgctcgggatgtccctgattattatgacatcatcaaagatccaatggatttgaagacaatgtctaagagggtggattcagagcaatattatgtaacatttgagatgtttgttgcggatgccagaagaatgtttgcgaatgcacgcacctataattctccagaaaccatttattacaaatgttctacaaggttagaagcccactttcaaagcaaagtgcaagcgggcctccagcctggtaccaaaattcagtag

SEQ ID NO: 474 - protein, 540 aa, Glycine max
MESHGGGPLRSRSSQSPSPSHSASASATSSIHKRKLASEDHAPPFPPSSFSADTRDGALTSNDDLESISARGADSDSDDDSEDAVVDDDEDDYGNDNDSSIRTFTASRLSNPPSAPRNTKLKTEISTVKIENSDGAKDAVVGACAAASAGSVPGIVVKEDPTKIFTDNLQTSGAYTAREESLKKEEEAGRLKFVCLSNDGVDEHMVWLIGLKNIFARQLPNMPKEYIVRLVMDRSHKSVMVIRRNHVVGGITYRPYASQKFGEIAFCAITADEQVKGYGTRLMNHLKQYARDMDGLTHFLTYADNNAVGYFIKQGFTKEIHLEKDRWQGYIKDYDGGILMECKIDPKLPYTDLSTMIRRQRQAIDEKIRELSNCHIVYAGIDFQKKEAGIPKKIIDDIPGLREAGWTPDQWGHSRFRTLNVSTDNATNQKHLNGFMRSLLKSMFDHADAWPFKEPVDARDVPDYYDIIKDPMDLKTMSKRVDSEQYYVTFEMFVADARRMFANARTYNSPETIYYKCSTRLEAHFQSKVQAGLQPGTKIQ

SEQ ID NO: 475 - DNA, 1683 bp, Populus trichocarpa
atggacactcactctcacttaactgcacctaatcgctctcgcagctctcaatctccgtctccttcgcactcggcctcggcctcggcctccgcctctgcaacctctcccatccacaaacggaaactcgccgcggctgcggcggcgtacgacgaccacttgccaccatttgctccgtcttctctgtccgcagacactcgcgacggcgctctcacctccaacgacgaccttgagagcatctccgctcgcggcgccgactctgactccgatgacgctgaagattccgacaccgtcctcgacgatgacgaggaagacttcgacaacgattcctccatgagaacgttcaccacagcccgcctcgagaccactaacgccgctggcagcagcagccggaacacgaagatcaaaatggagaacacgaatgtcaagattgaaaattctgatagcgggaaggacggtgggcacacagggactggtgcagtggggcctgctgcagcggggagttctgggccagggattgtggtgaaggaggattctgttaaaatatttacggaaaatttgcaggctagtggagcttatagcgcgagagaagagagtttgaagagagaggaggaagcaggaaaactcaagtttgtgtgttattcaaatgatgatgttgatgagcatatggttcggctgataggattgaagaatatatttgcgaggcagttgcctaacatgcccaaggagtacatagttcgacttgtgatggatagaggccacaaatctgtgatgattattagacgcaatcaggtggttggtggtatcacttatcgtccatatgtcagtcagaggtttggggagatagctttttgtgcaatcaccgcagatgaacaagtaaaaggttatggcacgagattgatgaatcacttaaagcagcatgcacgtgatgttgatgggttaacacattttctgacgtatgctgacaataatgctgttggttattttatcaagcagggtttcacaaaagagatttacttggagaaagatcgatggcaagggtatattaaagactatgatggaggtatcttaatggaatgcaagattgatcaaaaacttccttacactgacttatcaaccatgattcgtcgtcagagacaggcaattgatgaaaagataagagagctatccaattgtcatatcatctatcctggaattgattttcaaaagaaagaagctggtattcccaagaaaatcatcaaagtcgaggatattcctggcttgagggaggctgggtggactcctgatcaatggggccattcacgtttcagaacattaaacactgctacggatagtgccacaaatcaaaaacatttgactgcatttatgcgctcacttttaaagtcaatgcatgaccatgtggatgcttggccatttaaggaaccagttgatgctcgtgatgtccctgattattatgacatcatcaaggatcccatggatctgaagacgatgtcaaaaagggtagagtcagaacaatactatgtaacacttgagatgttcattgctgatgttaagaggatgtgtgccaatgcacggacatacaactcacctgataccatttattataagtgtgcaaccaggctggaagcccattttcaaagcaaggttcagtcaggcatccaatctggtacaaaaattctgccatga

SEQ ID NO: 476 - protein, 560 aa, Populus trichocarpa
MDTHSHLTAPNRSRSSQSPSPSHSASASASASATSPIHKRKLAAAAAAYDDHLPPFAPSSLSADTRDGALTSNDDLESISARGADSDSDDAEDSDTVLDDDEEDFDNDSSMRTFTTARLETTNAAGSSSRNTKIKMENTNVKIENSDSGKDGGHTGTGAVGPAAAGSSGPGIVVKEDSVKIFTENLQASGAYSAREESLKREEEAGKLKFVCYSNDDVDEHMVRLIGLKNIFARQLPNMPKEYIVRLVMDRGHKSVMIIRRNQVVGGITYRPYVSQRFGEIAFCAITADEQVKGYGTRLMNHLKQHARDVDGLTHFLTYADNNAVGYFIKQGFTKEIYLEKDRWQGYIKDYDGGILMECKIDQKLPYTDLSTMIRRQRQAIDEKIRELSNCHIIYPGIDFQKKEAGIPKKIIKVEDIPGLREAGWTPDQWGHSRFRTLNTATDSATNQKHLTAFMRSLLKSMHDHVDAWPFKEPVDARDVPDYYDIIKDPMDLKTMSKRVESEQYYVTLEMFIADVKRMCANARTYNSPDTIYYKCATRLEAHFQSKVQSGIQSGTKILP

SEQ ID NO: 477 - DNA, 1893 bp, Picea sitchensis
atggagggccactcggggattctgggattcgggcagggcttctccaggagctctcagtctccaaatccttcaccttcaccgtcgcactcggcttcggcctcagtgacgagctcaggtcagaagcgcaagcgcaacgaagctgtgcacgcgggggtggcttctaattccacgggaatgttaccagtgaccccttctcacatatactcccacctgcatcccatacccatgtcgatgcccatgcacatctcgcacccttcctcgctttccgagagccgagatggtgccctcacctctaacgaggacgacgacaacctcactgggggcaaccagtcgcagctggacagcatgagcgccggcaacaccgacggcagagaggatttcgacgacgaagacgacgatgacgacgatgaagaagacgacgacgaagttgaaggagacgaagaggaccaagaccacgaccctgaagcagatgacgactcggacgacggccacgattccatgcgcacattcaccgccgctcgcttggacaacggcgctcctaattcccgcaatcttaaacccaaggccgatgctgctggagttgcggttgccaccactgttaaaactgagacaattctcgacacagtcaaggcagagaagattagtagtaacaataacaacaacaacaatgtctccgccaacaatgcccaagttgctccttccggttctgctgttttactcagtgccgtgaaagaggaagctaataaacctacttccactgatcacattcagaccagcggagcctattgtgctagagaagaatccctcaagagagaggaagacgcagaccggcttaaattcgtgtgtttcggtaatgatggaattgatcaacatatgatctggcttattggattaaagaatatatttgcaaggcaacttccaaacatgccaaaggagtatattgttagacttgtaatggacaggagccacaagtcaatgatgatcatcaagcaaaatcaagttgttgggggcatttcttatcgcccttatcttagtcagagatttggagaaatagctttctgtgctattactgcagatgaacaagtaaaaggctatggaacaaggctgatgaatcatttgaaacaacatgctcgtgatgtggatgggctaacacattttctaacatatgctgacaatcatgcggttggctacttcattaaacagggttttacaaaggagatcgacctggagaaggagagatggcatgggtatattaaggattatgatggagtaatcctcatggaatgcaaaattgaccctaagttgccttacacagatctaccagctatgatccggcggcagcggcagacattagacgaaaagataagggaactttctaattgccatattgtctactcaggcattgacattcaaaagaaagaagcaggcattcctaggaagcccatcaaggttgaggacattcctggtctgaaggaggcgggctggacaccagatcaatggggttactcacgtattcgtttaatgaatatcccatctgagggcctgccaaatcgccaggcgctccatgcctttatgcggtctctatttaaggctatgaccgaacatgctgatgcttggccattcaaggacccagtagatcctcgtgatgtgcctgactactatgatatcataaaagatccaatggatttgaaaacaatgtcaaagcgcctggacagtgagcaatactatgtaacactggacatgttcgttgcggatgtaaagaggatgtttacgaatgcacggacatataataccccggaaactatttattataaatgtgcaaacaggttggattcctacttttttaacaaacttcaagctggaactcaggttaataacaagaatcagcagtga

SEQ ID NO: 478 - protein, 630 aa, Picea sitchensis
MEGHSGILGFGQGFSRSSQSPNPSPSPSHSASASVTSSGQKRKRNEAVHAGVASNSTGMLPVTPSHIYSHLHPIPMSMPMHISHPSSLSESRDGALTSNEDDDNLTGGNQSQLDSMSAGNTDGREDFDDEDDDDDDEEDDDEVEGDEEDQDHDPEADDDSDDGHDSMRTFTAARLDNGAPNSRNLKPKADAAGVAVATTVKTETILDTVKAEKISSNNNNNNNVSANNAQVAPSGSAVLLSAVKEEANKPTSTDHIQTSGAYCAREESLKREEDADRLKFVCFGNDGIDQHMIWLIGLKNIFARQLPNMPKEYIVRLVMDRSHKSMMIIKQNQVVGGISYRPYLSQRFGEIAFCAITADEQVKGYGTRLMNHLKQHARDVDGLTHFLTYADNHAVGYFIKQGFTKEIDLEKERWHGYIKDYDGVILMECKIDPKLPYTDLPAMIRRQRQTLDEKIRELSNCHIVYSGIDIQKKEAGIPRKPIKVEDIPGLKEAGWTPDQWGYSRIRLMNIPSEGLPNRQALHAFMRSLFKAMTEHADAWPFKDPVDPRDVPDYYDIIKDPMDLKTMSKRLDSEQYYVTLDMFVADVKRMFTNARTYNTPETIYYKCANRLDSYFFNKLQAGTQVNNKNQQ

SEQ ID NO: 479 - DNA, 1560 bp, Selaginella moellendorffii
atggtaggcatgcatcacaatccgtcttccgtgtttgggctagggttctctcatgcgatggaatccgggataatgccggatgatagcagggagaatgggagccagctaggtggaggaggcgatggcggtggcagcaaaggggaggagtatgacgacgaggacgaggatgggaatgacgacgaaggggaggaggatgaggaagaggatggagagcaagacgatgaggacgatcaggagacgacgacgagcttgcctctgcagcaaggaccgcttcgcccgcccgcattgaatcttccagtggtttcgtcggtcaaggtggaagcagccgagcaaaaggatttgctatcgtcgcaaatggcctttggcaatttaccacagcctgtgacggtgaccgtcaaggaggaatcgaccaagcctacgctggtggagacgatccaaaccagtggagcgtactgtgcgcgagaggaaaatctcaagaaagaggaagacgctggaaggatcaagtttgtctgctactgcaatgacggtgacgaccaacatatgatttggcttgttgggctcaagaacatcttttctcgtcagctgccaaacatgccaaaggattacatcgtccgtttggtcatggacaggagccataagtctatgatgattgtgaagcacaaccaagttataggcggcatcacttatcgtccgtatccaagccaaaagtttggagagatagcattctgtgcaatcacagcggacgagcaagtaaaaggctttggcacgaggctcatgaaccacctaaaaaagtatgctcgggacgaagacgggcttactcatttcctcacgtatgccgataacaatgcagtgggttacttttcaaagcagggatttaccaaggaaatatttctagataaagagatttggcacggatacatcaaagattatgacggtggaacattaatggaatgtaggatcgatccaatcttaccttacatagatctcccggcgatgattagattacaacggcaggcaatagatgagaaaattcgggagctttcaaactgccacatagtttaccctggattggaaatcctcaagaaggacttcaatgttccacggaggcctttgagacccgaagacataccaggtctaaaggaagctggatggacgccagaccaactgaccacttctcgtataagatttgtaaactcaccgaatgatgggccgccaacgaggcaagcccttcagggactcatgcgttccatgttaaagctggtttgcgatcactcggaagcttggccgtttagagaaccggtggatgcgcgtgaggtgccggactactacgatataatcaaagatcccatcgatttaaaaaccatatccaggaggctggagagcgagcaattctacttgacgctggaaatgttcgtagccgacctgaaacggatgtttgggaacgccagggtctacaactcaccggagacgatctacttcaagtgcgcaaacagggtggaagacttcttcacgaacaagctcaagtcgtgcgttactttcctccggggtgatgcatcgtaa

SEQ ID NO: 480 - protein, 519 aa, Selaginella moellendorffii
MVGMHHNPSSVFGLGFSHAMESGIMPDDSRENGSQLGGGGDGGGSKGEEYDDEDEDGNDDEGEEDEEEDGEQDDEDDQETTTSLPLQQGPLRPPALNLPVVSSVKVEAAEQKDLLSSQMAFGNLPQPVTVTVKEESTKPTLVETIQTSGAYCAREENLKKEEDAGRIKFVCYCNDGDDQHMIWLVGLKNIFSRQLPNMPKDYIVRLVMDRSHKSMMIVKHNQVIGGITYRPYPSQKFGEIAFCAITADEQVKGFGTRLMNHLKKYARDEDGLTHFLTYADNNAVGYFSKQGFTKEIFLDKEIWHGYIKDYDGGTLMECRIDPILPYIDLPAMIRLQRQAIDEKIRELSNCHIVYPGLEILKKDFNVPRRPLRPEDIPGLKEAGWTPDQLTTSRIRFVNSPNDGPPTRQALQGLMRSMLKLVCDHSEAWPFREPVDAREVPDYYDIIKDPIDLKTISRRLESEQFYLTLEMFVADLKRMFGNARVYNSPETIYFKCANRVEDFFTNKLKSCVTFLRGDAS

SEQ ID NO: 481 - DNA, 1524 bp, Physcomitrella patens
atgtcgtccgatggggtcaagaatgggcctagctatggtcggttcgaaggtgcgaacggcggtggggatggggatgaagaggaggacgacgatgaggaggaaggcgaagcgaacgaagaagaaggagagcacgacgaagatggggaggacgacgaggaagacgatgacgaagaagaggaagatacgatgcagacattctcagctgcacggcttgaagcgcctcctgcacacagcgtttcccgcgtgaaggttgaaccatcagtggatggagctcgagagtccggagcacagttaccagccgtgaccccaagtcccaatctagctggtgccagtggcaactctgttgacgtcaagcctagcgtggcagatacaattcagaccagtggtgcttattgttctcgcgaagaaaatcttaagaaagaggaagatgctggtcgccttaagtttatatgccttagcaatgacggcgaagatcagcatatgatttggcttattggtttgaaaaacatctttgcaaggcaacttcccaacatgcctaaagagtacatagtgcgtcttgtgatggacagaagccacaaatctatgatgatcatcaaaaacaacaacgtggtgggaggtattacatacagaccatatcttagccaaagatttggggagattgccttttgcgctattactgccgatgaacaggtgaaagggtatggtacacgcttgatgaatcacttgaagcagtatgcgcgtgtttctgatggtcttacacattttcttacgtatgcggataacaatgctgttggttacttcaccaagcagggattcacaaaagaaattgaaatggagaaggagagatggcatggttatatcaaagattatgatggagggaccttgatggagtgccgcattgatccaaacggttgcgctgggttggaagctattgatgagaagatccgagaactttcaaactgtcatctggtctatcaagggcttgatctacctaagaaggaagctggagtcctcaagcgacccttacgaatagaagatattccgggtcttaaagaggcagggtgggtacctgatcaaccacctcattctcggtttaggctcatcaacaacccctcagatggtccaccttcacgtcaagctttgcataattttatgcgatcattggttaaggctgtaactgagcacgcagatgcgtggcctttcaaagaaccagtcgatgcacgggaggttcctgattactatgacatcattaaggatcccatcgatttgaagaccatctctaaacgcgtggaaagtgaacaatattatataactctagagatgtttgcttccgatatgaagcgtatgttcaataacgctcgcacgtacaactctccagaaactatctattacaagtgctggattcattttttacaaacaagtttcaggctggtgctcagttggtcagcagatcacaacacttgtaacgcaattctaccccaaagccaggctacctgcaaatcctgtggagctcttatgctctag

SEQ ID NO: 482 - protein, 507 aa, Physcomitrella patens
MSSDGVKNGPSYGRFEGANGGGDGDEEEDDDEEEGEANEEEGEHDEDGEDDEEDDDEEEEDTMQTFSAARLEAPPAHSVSRVKVEPSVDGARESGAQLPAVTPSPNLAGASGNSVDVKPSVADTIQTSGAYCSREENLKKEEDAGRLKFICLSNDGEDQHMIWLIGLKNIFARQLPNMPKEYIVRLVMDRSHKSMMIIKNNNVVGGITYRPYLSQRFGEIAFCAITADEQVKGYGTRLMNHLKQYARVSDGLTHFLTYADNNAVGYFTKQGFTKEIEMEKERWHGYIKDYDGGTLMECRIDPNGCAGLEAIDEKIRELSNCHLVYQGLDLPKKEAGVLKRPLRIEDIPGLKEAGWVPDQPPHSRFRLINNPSDGPPSRQALHNFMRSLVKAVTEHADAWPFKEPVDAREVPDYYDIIKDPIDLKTISKRVESEQYYITLEMFASDMKRMFNNARTYNSPETIYYKCWIHFLQTSFRLVLSWSADHNTCNAILPQSQATCKSCGALML

SEQ ID NO: 483 - DNA, 1554 bp, Chlamydomonas reinhardtii
atgagcgacgaagcaccacctaccaaacgacaatgtattgagcaagttcaaagccacgcagggcctatagacgcgaacggcgaagtcaaggttgaaccgcgcagcgacgcggcagtagctgcgcagcaggcagcgcaagcaaaagaacgttcagcagcgagccaactggtgcaggaacccgcggggccagggccgagctcttcctcagcgcgggaccggccctacatcgctccgggcgcctactcgcagcgcgaggaggcccttataaagcgcgaacaggatggagacatcgcattccgctacgtattcaacaacgacgacccgcagaacctcatttacttggtggggctgaagaacattttctcaaagcagctgccaaacatgcccaaggagtacatcgtgcgcctggtgtttgaccggcggcaccgctccgtggcgctgctgaagcgcaacggcaccgtcatcggcggcatcacctaccgcgccttccacgagcaggcattcggcgagatcgccttctgcgccgtgaccagccacgagcaggtcaagggctacggcacgcggctcatgaaccagaccaaggagttcgcgcgcaccgtggaccgcctcacgcacttcctcacctacgccgacaacaacgcggtggggtactttgagaagcagggcttcacgcgcgagatcacgctggcgcgggagcgctggcagggctacatcaaggactacgacggcggcacgctgatggagtgcgtcatgcacccgcgcgtcagctacaccgccctgcccgacctcatccgcacgcagcgcctggcgctggacgaccgcgttcgccaggtctccaactcccacgtggtgcggaccgggctgaggcacttccaggaggaggacgcgcggctggcggcggccacggcagcagcagcggcggcggcgggggcagcaggagggagaggcgcgggcggtgtaggggccggggcgccggctggtgacgcggcggcggcaacagcggacaccgacccggcgttgcggcgacgtatgctggacatcggcggcatcccaggggtgcgggaggcgggctggtcgccggacatggtgcagcaggggccgcgcttccggctgctgctggacgaggcgggggcgggtccggcggtggaggcggggtcggaggcgctgcaccggttcctggtgctgctgctggagcacgtcaaggggctggaggacgcctggccgttccgggagcgggtggcggtgcaggacgcgcccgactactacgacatcatcaaggaccccatggctctggacgtgatggaggagcgcctggcctcgcgcggctactacgtcaccctggacatcttcaccgccgacctgcgccgcgtgttcgacaactgccgcctctacaacgcgccggacaccatctactacaagctggccaacaagctggaggcgcaggtcaacgccttcatgtccaaccacgtgctgtacgaggatgaggcagggccggcggcggcggcagcggcagcggcagctgggactggggctggagcaggcgctgggcggtag

SEQ ID NO: 484 - protein, 517 aa, Chlamydomonas reinhardtii
MSDEAPPTKRQCIEQVQSHAGPIDANGEVKVEPRSDAAVAAQQAAQAKERSAASQLVQEPAGPGPSSSSARDRPYIAPGAYSQREEALIKREQDGDIAFRYVFNNDDPQNLIYLVGLKNIFSKQLPNMPKEYIVRLVFDRRHRSVALLKRNGTVIGGITYRAFHEQAFGEIAFCAVTSHEQVKGYGTRLMNQTKEFARTVDRLTHFLTYADNNAVGYFEKQGFTREITLARERWQGYIKDYDGGTLMECVMHPRVSYTALPDLIRTQRLALDDRVRQVSNSHVVRTGLRHFQEEDARLAAATAAAAAAAGAAGGRGAGGVGAGAPAGDAAAATADTDPALRRRMLDIGGIPGVREAGWSPDMVQQGPRFRLLLDEAGAGPAVEAGSEALHRFLVLLLEHVKGLEDAWPFRERVAVQDAPDYYDIIKDPMALDVMEERLASRGYYVTLDIFTADLRRVFDNCRLYNAPDTIYYKLANKLEAQVNAFMSNHVLYEDEAGPAAAAAAAAAGTGAGAGAGR

SEQ ID NO: 485 - DNA, 1398 bp, Calluna vulgaris
atggcagaagcagaggagcccccatataagaagcagaaggtcgatgctgatacaacagtagaagattcgctctttgaaagattacaggataatgacgcagctcaacctctggatgcgccagcagcagctgccagcagtggccaaagtggcagggcggatggggcagctgttgctgaagtacaactagcagctccattgcctgcgaacgggattgcagagagcaatgctgagccgcccactcatgaaggtgatgcactattggagaatggcggcatcccccttgtcgaggtgccagcagggatgttctcgcagcgcgagctgtacatggccaagagggaggccgatggggacctcgccttcgagtatgtggacaatgacaacactgccaaccacaacatgtggctgattgggctgaagaacatcttcagcaagcagctgcccaacatgcccaaggagtacattgcgcgattggtgctcgacaggcgccatcgctctgtggccatcatcaggcggggaggcacggtgctgggggggataacctaccgccccttccacgaccagcgctttggggagattgcgttctgcgctgtcacagccatcgagcaggtgaaggggtttggagcgcggctgatgaactacacaaaggagtttgccagggcgcacgaccacctgacgcatttcctgacctatgcggacaacaacgcggtcgggtattttgcaaagcagggcttcacaaaggagatcaccctggagaaggacaggtgggtggggttcataaaggactacgacgggggcacgctgatggagtgcataatcagcgaccgcctgccctacacagatctgccgggcatgctgcgcgcgcaacgtgccgccctggaccgccacatcagaacgcttagtaagtcccacgtcatccaccccggcctcaccaccttccgggacggccagcgccgcgtggagatcgccagcatccccggcgtggccgaggccggctggacggctgagatggcagagccaccgcattacaacctgctcatagaccgcatggtcctgccagtcacaccagacaacctgcagcgcttcatggagagggcctggagagcgctgtactctctggacgactcgtggcccttccgggagcccgtagatgcggaggacgtcccggattactacgaaatagtcaaggacccggtggacctgagcacgatagagcagcggctagcgaggcgggactactatgtgacgctgcacatcttcatcgcggatgtcaaccgcatgtgcgccaacgcgcgcgtctacaactcggccgagaccatctacttcaagatggccaacaagctggaggccttcctggacgagtacatccactcccacgtggtcttcaacaacccccagtga

SEQ ID NO: 486 - protein, 465 aa, Calluna vulgaris
MAEAEEPPYKKQKVDADTTVEDSLFERLQDNDAAQPLDAPAAAASSGQSGRADGAAVAEVQLAAPLPANGIAESNAEPPTHEGDALLENGGIPLVEVPAGMFSQRELYMAKREADGDLAFEYVDNDNTANHNMWLIGLKNIFSKQLPNMPKEYIARLVLDRRHRSVAIIRRGGTVLGGITYRPFHDQRFGEIAFCAVTAIEQVKGFGARLMNYTKEFARAHDHLTHFLTYADNNAVGYFAKQGFTKEITLEKDRWVGFIKDYDGGTLMECIISDRLPYTDLPGMLRAQRAALDRHIRTLSKSHVIHPGLTTFRDGQRRVEIASIPGVAEAGWTAEMAEPPHYNLLIDRMVLPVTPDNLQRFMERAWRALYSLDDSWPFREPVDAEDVPDYYEIVKDPVDLSTIEQRLARRDYYVTLHIFIADVNRMCANARVYNSAETIYFKMANKLEAFLDEYIHSHVVFNNPQ

SEQ ID NO: 487 - DNA, 1344 bp, Ostreococcus lucimarinus
atgcagcgcggcacgcgcgcgcgtgaggacgcgagcgatcaggatgatgtctcgggaagcgcgcgcggcgtgaagcacgcgcgcgcggatgagagcggcgcgaacgggtcgagggacggcgcgggggcggcggacggaacgccgaataaacaaacgacgacgacgggcgcgactgcgggcgcgacgggggcgacgtcgccggtgtcgccgtcgagaggggcgtacgccacgcgagaatcgcacctgcgtaagcaagagcgtgatggggagctgaagtgggaggtgattaaaaacgacgggagcgaggcgaattcgcgcttgctcgtggcgctgaagaacatttttagcaaacagctgccgaatatgcccaaggagtacatcgtgcggttggtttttgactccagacattactcgatgctgtgcatgaagaatgggaacgtcatcggggggatcacgtacaggccgtttccgaagcaacgcatgggtgagattgctttttgcgcggtgagcgcaaatgaacaggtgaagggatacggtacgcggttgatgaatcacatcaaggagtacgctaaggaaaaggaaaatatgacgcacctgatcacgttcgcggataacaatgcggtggggtactttcaaaagcaaggattcacaaaggaaatcatgatggagcgcgaaaagtggtacgggtacatcaaagagtacgacggtgggacgattatggagtgtcaattagatgggcacgtctcctacgtggactttgtgaatcagatccgagaacagcgcaaggcggtggaggccaaggtacgagagatgagcacggcgcacaaagtctacccgggattgaaggaccacttcaagccgagcgccgagggcaagtatatccccatcgacgtcaaacacatcaaaggcttgaaagaggcgaagtgggaggacccaggactaccaaagtaccgtttagtccacccaggatgcggcgatggcatacccacgaaggcaaacttgcataaattcatgagagccatcgtaaacgtgattcaggcgcactccgatgcgtggccgtttgccgcacccgtgaacccgctcgaagtcacagactactacgacgtcgtcaaggatcccgtcgatatggaactcatccaagaacgcgtctcggcggggaattactacgtctctttggagatgttttgcgccgacttccgtttgatgttcaacaactgtcgcatatacaactcacgcgacactccgtatttcaaagcggccaatcgtctcgaggcgttcttcgaatcgaaaatcgccgccggggtgaattggaaaattcgcgaggcaccttctcgaggtcgatga

SEQ ID NO: 488 - protein, 447 aa, Ostreococcus lucimarinus
MQRGTRAREDASDQDDVSGSARGVKHARADESGANGSRDGAGAADGTPNKQTTTTGATAGATGATSPVSPSRGAYATRESHLRKQERDGELKWEVIKNDGSEANSRLLVALKNIFSKQLPNMPKEYIVRLVFDSRHYSMLCMKNGNVIGGITYRPFPKQRMGEIAFCAVSANEQVKGYGTRLMNHIKEYAKEKENMTHLITFADNNAVGYFQKQGFTKEIMMEREKWYGYIKEYDGGTIMECQLDGHVSYVDFVNQIREQRKAVEAKVREMSTAHKVYPGLKDHFKPSAEGKYIPIDVKHIKGLKEAKWEDPGLPKYRLVHPGCGDGIPTKANLHKFMRAIVNVIQAHSDAWPFAAPVNPLEVTDYYDVVKDPVDMELIQERVSAGNYYVSLEMFCADFRLMFNNCRIYNSRDTPYFKAANRLEAFFESKIAAGVNWKIREAPSRGR

SEQ ID NO: 489 - DNA, 1317 bp, Ostreococcus RCC809
atgggggcagacgcggagggcgacgccccggaaacgtcgaacagaagacgagggagagatgcggacgaggagaatgccggtgccggcgcgaagcgcgagagaggcgaggataacgcgaccgagggcgcggaggcgacggtgagcccttccaagaagttggccgcggcgtcgccgtcttcgcctacccgaggagcctacgccacgcgagaatcgcaccttcgcaagcaagaacgcgacggtgagctcaaatggaaggttatcaagaatgatggcagcgaggagagttcgaggttgctcatcgcactgaagaatatctttggcaagcagttgccgaacatgccgaaggaatacattgtgcgcttggtgttcgattcgagacacaactcgatgctgtgcatgaagaacggcaacgtcatcggtggtatcacgtaccgtcctttcccgaagcagaggatgggggagatcgcgttttgtgcggtgagcgcgaacgagcaggtgaagggctacggtacgcgtttgatgaaccacatcaaggaatacgcgaaggatacagagaacatgacgcacttgatcacgttcgcggataataacgcggtgggttactttgaaaaacaaggtttcacgaaagagattatgatggagcgcgagaagtggaacggttacatcaaagagtacgacggcgggacaatcatggagtgtcagctggacggacacatctcatacgttgactttgtgaatcaaataagagagcaacgcaaggtagtagaggccaaggtgagggaaatgagcacggctcacaaggtgtatcccggattgaaggatcattttaacccgaaaacggaggacggaaagtacactccgatcgacgtcaagcacatcaaaggcttgaaggaggctaaatgggaggcacccgagatgcccaagttccgattagtgtatcccggttgcggcgatggattgcccacgcgcgagaatctgcataagtttatgcgcgcgctcatcaacatcatccaggcgcatgcggatgtgtggccgttcgccggacccgtgaatcccatggaagtacccgactattacgaaatcgtcaaggacccgctcgacttggaactgatcaaagacagagtctcgagcgagaactattacacgtctttggaaatgttctgcgcggatttccgtctgatgttccacaactgccgattgtacaattctcgtgacacggtgtacttcaagtgcgccaacagactcgaagctttcttcgactccaaaatcgcggccggggtgaattggaaagtccgcgagccaccgacgaagcgatga

SEQ ID NO: 490 - protein, 438 aa, Ostreococcus RCC809
MGADAEGDAPETSNRRRGRDADEENAGAGAKRERGEDNATEGAEATVSPSKKLAAASPSSPTRGAYATRESHLRKQERDGELKWKVIKNDGSEESSRLLIALKNIFGKQLPNMPKEYIVRLVFDSRHNSMLCMKNGNVIGGITYRPFPKQRMGEIAFCAVSANEQVKGYGTRLMNHIKEYAKDTENMTHLITFADNNAVGYFEKQGFTKEIMMEREKWNGYIKEYDGGTIMECQLDGHISYVDFVNQIREQRKVVEAKVREMSTAHKVYPGLKDHFNPKTEDGKYTPIDVKHIKGLKEAKWEAPEMPKFRLVYPGCGDGLPTRENLHKFMRALINIIQAHADVWPFAGPVNPMEVPDYYEIVKDPLDLELIKDRVSSENYYTSLEMFCADFRLMFHNCRLYNSRDTVYFKCANRLEAFFDSKIAAGVNWKVREPPTKR

SEQ ID NO: 491 - DNA, 1254 bp, Ostreococcus taurii
atggacgcgatgacggaggacgagccctccagtaagcgcgtgagggaggagacgcccgggaagagggtaaacggagacgcgagcgggacgccagaaagaggagacaaggcgaagtacgagagcgatgcaaagccgtcaaccgcgtcgccgacgtcgccggtgagaggtgcgtacgcaaccagagagtcacacctgaggaagcaagagcgagacggtgagctcaagtgggaggttattacgaatgacggcgttgagcgccactcaaaacacttggtggcgctgaagaacatttttagcaagcagttgccgaacatgcccaaggagtacatcgtgcgattggtgttcgattcgaggcacaaatcaatgttgtgcatgaaaaacgggaacgtgatcggtgggatcacgtacaggccgttcccgaagcagcgcatgggggaaatcgctttttgcgccatcagtgcaaacgaacaggtcaagggatacggcacgcgattgatgaatcacatcaaggagtacgccaaggaaacagagaacatgacgcatttgatcacgtttgctgataacaacgcggtcggatacttccaaaagcaaggcttcacgaaggaaatcatgatggagcgggagaagtggaatgggtacatcaaggagtacgatggcgggaccatcatggagtgccaacttgatggacaggtctcgtacgtggactttgtgaaccagattcgagaacaacgcaaggcggtggaggcgaaggtgcgagagatgagcacagcgcacaaggtttataacggcctgaaggaccatttcaagcccagcgccgacggcaagtacacgccgatcgacgtgaagcacatcaagggcctgaaggaggcgaagtgggagcgcaccggcctgccaaagttccgattagtccaccctggatgcggcgatggattgccgacgaaggaaaatatgcacaaattcatgcgagcgatcgtgaacatcgtgcaggcgcacgcggacgtgtggccgtttggcggtccggtcaacccgattgaagttccggattattacgaagtccgcgtcgcctcgggaaactactacgtctcgctagagatgttttgcgccgatttccgcctgatgttcaacaactgccgcctgtacaactccccggacacggtgtacttcaagtgcgccaaccgtctcgagaccttcttcgagtccaaaatcgccgccggcatcaactggaaggtgcgcgagccccctacaaagcgatga

SEQ ID NO: 492 - protein, 417 aa, Ostreococcus taurii
MDAMTEDEPSSKRVREETPGKRVNGDASGTPERGDKAKYESDAKPSTASPTSPVRGAYATRESHLRKQERDGELKWEVITNDGVERHSKHLVALKNIFSKQLPNMPKEYIVRLVFDSRHKSMLCMKNGNVIGGITYRPFPKQRMGEIAFCAISANEQVKGYGTRLMNHIKEYAKETENMTHLITFADNNAVGYFQKQGFTKEIMMEREKWNGYIKEYDGGTIMECQLDGQVSYVDFVNQIREQRKAVEAKVREMSTAHKVYNGLKDHFKPSADGKYTPIDVKHIKGLKEAKWERTGLPKFRLVHPGCGDGLPTKENMHKFMRAIVNIVQAHADVWPFGGPVNPIEVPDYYEVRVASGNYYVSLEMFCADFRLMFNNCRLYNSPDTVYFKCANRLETFFESKIAAGINWKVREPPTKR

SEQ ID NO: 493 - DNA, 1320 bp, Saccharomyces cerevisiae
atggtcacaaaacatcagattgaagaggatcacttggatggagctacgacggatcccgaagttaaacgggtaaaattagaaaacaacgttgaagaaatacaacctgagcaggctgagaccaataaacaagagggcaccgataaagagaataaaggaaagttcgagaaagaaactgagagaataggaggatctgaagtggttacagatgtggaaaaaggaattgtcaaatttgaatttgatggtgttgaatacacattcaaagagagacccagtgtcgtagaggaaaatgaaggtaaaattgagtttagggtggtgaataatgataatactaaagaaaacatgatggtcctaactggattaaaaaacatttttcaaaagcaattaccaaaaatgcccaaagaatacattgccaggttagtctatgatcgaagtcatctttccatggctgtcattaggaagccattgactgtcgtaggtggcataacatatcgacctttcgataagagagaattcgcagaaattgttttctgtgccatcagttcgacggaacaggtacgcggttatggtgcgcatctaatgaatcacttaaaagactatgttagaaatacctcgaacataaaatattttttgacatatgcagataattacgctattggatactttaaaaagcaaggcttcactaaagaaatcacgttggataaaagtatatggatgggatatattaaagattatgaaggtggtacgctgatgcaatgttctatgttaccaagaatacgatatttggacgcaggtaagattctattattacaagaagcggccctgcgaagaaaaataagaacgatttcgaaatcgcatattgtaaggcctggtttagagcaattcaaagacttaaacaatatcaaaccgattgatccaatgactattcctggcttgaaagaagccggctggactcccgagatggatgcgttggcacaacgtcccaagcgtggtccacacgatgcagcaatacagaatatactcacagagctacaaaatcatgcagcagcttggcccttcttacaacccgttaataaagaggaggtccccgactattatgattttatcaaagagccaatggacttgagcaccatggaaataaaattagagagcaacaaatatcagaagatggaagacttcatatatgatgccagattggtgtttaacaattgccgaatgtacaatggcgagaatacgtcgtattacaagtatgctaataggctagagaaattcttcaataataaagtaaaagaaatacctgaatattctcaccttattgattaa

SEQ ID NO: 494 - protein, 439 aa, Saccharomyces cerevisiae
MVTKHQIEEDHLDGATTDPEVKRVKLENNVEEIQPEQAETNKQEGTDKENKGKFEKETERIGGSEVVTDVEKGIVKFEFDGVEYTFKERPSVVEENEGKIEFRVVNNDNTKENMMVLTGLKNIFQKQLPKMPKEYIARLVYDRSHLSMAVIRKPLTVVGGITYRPFDKREFAEIVFCAISSTEQVRGYGAHLMNHLKDYVRNTSNIKYFLTYADNYAIGYFKKQGFTKEITLDKSIWMGYIKDYEGGTLMQCSMLPRIRYLDAGKILLLQEAALRRKIRTISKSHIVRPGLEQFKDLNNIKPIDPMTIPGLKEAGWTPEMDALAQRPKRGPHDAAIQNILTELQNHAAAWPFLQPVNKEEVPDYYDFIKEPMDLSTMEIKLESNKYQKMEDFIYDARLVFNNCRMYNGENTSYYKYANRLEKFFNNKVKEIPEYSHLID

SEQ ID NO: 495 - DNA, 1239 bp, Dictyostelium discoideum
atggaaacacaacaaccaacattattacaagataataacaataataataataataataattataatttaaatataggtaataatgatatagtgaatcaacatccaccacaaatacaacaacaacaacaacaacaacaacaacaacaacaaccaccacaacaattattaggaccagaagatggtttacaaattgataattcaagaggtataacagcaaaagaagagaaagaaagaggtatattaagatttgaagttataacaaatgatagtagttcaaagaatttagaattattaatgaatttaaagaatgtattctctaaacaattaccaaagatgccaagagaatatattgttagattaatgtttgatagatttcatcattcattattgattattaaaaataacaatgtaattggtggtatttgttttagaccatttcaacaacaaggtttcatagagattgcattttgtgcaatcacaagcagtgaacaagtgaaaggctatggttcattcctaatgactcatttaaaagaacataatagaaaagttggaatttaccatttcctaacgtttgcagataactttgcaattgaatattttcaaaaacaaggattcactcatgatataacattgctaaaagagaaatggaaaggtttcatccaagagtatgatggtggttcattaatggagtgtgttgtacacccaaatgtaacctatttagatataccgactatggtaaaagcgcagagaaatgcattgaatgaaaagattcgtactattagtacctcacatttagtttattcaggtttacaatgttttaatcatggtcaaagacgcatacccattgaaaagatacctggtatattagaagctggttggattaataatgttggaaatgttgatcaacaacaacaacaaataaattcacttcaacaacaattggcagttgtattacaaagtattaaaaatcatgatgattcatggccttttcttcaaccagtttcaattgaagaagtaccaacctattatacaactgtcaaagatcctgtcgaccttcaaatgatctctgatcgtttagcaactggaaattattatatcactaaaaatatctttttagctgatcttaaaagaatgtgtaataattgtagagaatttaatggtgaaaattcaccttattatgataacgcagatcgtttagaaaaatattgtaaaaatttagtaaataatttaaaaatttaa

SEQ ID NO: 496 - protein, 412 aa, Dictyostelium discoideum
METQQPTLLQDNNNNNNNNNYNLNIGNNDIVNQHPPQIQQQQQQQQQQQQPPQQLLGPEDGLQIDNSRGITAKEEKERGILRFEVITNDSSSKNLELLMNLKNVFSKQLPKMPREYIVRLMFDRFHHSLLIIKNNNVIGGICFRPFQQQGFIEIAFCAITSSEQVKGYGSFLMTHLKEHNRKVGIYHFLTFADNFAIEYFQKQGFTHDITLLKEKWKGFIQEYDGGSLMECVVHPNVTYLDIPTMVKAQRNALNEKIRTISTSHLVYSGLQCFNHGQRRIPIEKIPGILEAGWINNVGNVDQQQQQINSLQQQLAVVLQSIKNHDDSWPFLQPVSIEEVPTYYTTVKDPVDLQMISDRLATGNYYITKNIFLADLKRMCNNCREFNGENSPYYDNADRLEKYCKNLVNNLKI

SEQ ID NO: 497 - DNA, 1431 bp, Homo sapiens
atgctggaggaggagatctatggggcaaactctccaatctgggagtcaggcttcaccatgccaccctcagaggggacacagctggttccccggccagcttcagtcagtgcagcggttgttcccagcacccccatcttcagccccagcatgggtgggggcagcaacagctccctgagtctggattctgcaggggccgagcctatgccaggcgagaagaggacgctcccagagaacctgaccctggaggatgccaagcggctccgtgtgatgggtgacatccccatggagctggtcaatgaggtcatgctgaccatcactgaccctgctgccatgctggggcctgagacgagcctgctttcggccaatgcggcccgggatgagacagcccgcctggaggagcgccgcggcatcatcgagttccatgtcatcggcaactcactgacgcccaaggccaaccggcgggtgttgctgtggctcgtggggctgcagaatgtcttttcccaccagctgccgcgcatgcctaaggagtatatcgcccgcctcgtctttgacccgaagcacaagactctggccttgatcaaggatgggcgggtcatcggtggcatctgcttccgcatgtttcccacccagggcttcacggagattgtcttctgtgctgtcacctcgaatgagcaggtcaagggttatgggacccacctgatgaaccacctgaaggagtatcacatcaagcacaacattctctacttcctcacctacgccgacgagtacgccatcggctacttcaaaaagcagggtttctccaaggacatcaaggtgcccaagagccgctacctgggctacatcaaggactacgagggagcgacgctgatggagtgtgagctgaatccccgcatcccctacacggagctgtcccacatcatcaagaagcagaaagagatcatcaagaagctgattgagcgcaaacaggcccagatccgcaaggtctacccggggctcagctgcttcaaggagggcgtgaggcagatccctgtggagagcgttcctggcattcgagagacaggctggaagccattggggaaggagaaggggaaggagctgaaggaccccgaccagctctacacaaccctcaaaaacctgctggcccaaatcaagtctcaccccagtgcctggcccttcatggagcctgtgaagaagtcggaggcccctgactactacgaggtcatccgcttccccattgacctgaagaccatgactgagcggctgcgaagccgctactacgtgacccggaagctctttgtggccgacctgcagcgggtcatcgccaactgtcgcgagtacaaccccccggacagcgagtactgccgctgtgccagcgccctggagaagttcttctacttcaagctcaaggagggaggcctcattgacaagtag

SEQ ID NO: 498 - protein, 476 aa, Homo sapiens
MLEEEIYGANSPIWESGFTMPPSEGTQLVPRPASVSAAVVPSTPIFSPSMGGGSNSSLSLDSAGAEPMPGEKRTLPENLTLEDAKRLRVMGDIPMELVNEVMLTITDPAAMLGPETSLLSANAARDETARLEERRGIIEFHVIGNSLTPKANRRVLLWLVGLQNVFSHQLPRMPKEYIARLVFDPKHKTLALIKDGRVIGGICFRMFPTQGFTEIVFCAVTSNEQVKGYGTHLMNHLKEYHIKHNILYFLTYADEYAIGYFKKQGFSKDIKVPKSRYLGYIKDYEGATLMECELNPRIPYTELSHIIKKQKEIIKKLIERKQAQIRKVYPGLSCFKEGVRQIPVESVPGIRETGWKPLGKEKGKELKDPDQLYTTLKNLLAQIKSHPSAWPFMEPVKKSEAPDYYEVIRFPIDLKTMTERLRSRYYVTRKLFVADLQRVIANCREYNPPDSEYCRCASALEKFFYFKLKEGGLIDK

SEQ ID NO: 499 - DNA, 1497 bp, Phaeodactylum tricornutum
atgagcgccagcgaaacaggcgaagtatctcgcaagcgcaaagccgaggaaatagaggccgaggtagccaagggcgagccggagaaagatgatgaacccccggctgctgctccgacatcagacaaagtcgctgatgaggcagagaaggaaccagataacgacaatacggaagcttccacattagaacagatcgatccatcgattaaagattcacaagggatagacgagacggcgatgatggaggtggaccaggctgacatctcaccgacagaagatccccttccggcttcaaactctcccgctgctactggagaaagggatgccgaatccaacctagttgaggaatctactgatactgctacgaacaatcgcgagcaagctttagaggactctgttggagcttcgaaagacgcccagaatgtctacgatagccttcgatggatcgtggttcgcaacgacggggaacccgattccatgattaaactcgttggtctcaaatcgctcttttcgaagcagttacccaaaatgccgcgggcatatattgcccgtcttgtgtttgaccgccgtcatacatccttggctattctcaacgataatcccgacgtgaaagattccgacgaagaaattattggcggtatttgctaccgtgcttttccggaaatgcgttttgccgaaattgctttttgtgccgttaatgcgtcccatcaagtcaaaggatacggcaccaagcttatgaacttgctcaaaaagattggcgccgaaaccggaatcgaatatttcattacgtacgccgacaactacgccattggctacttcaaaaagcaagggtttgccaagaatatttccatgcccaagggtcgatactttggcctaatcaaggactatgacggtggcacaccgatggaatgctacgtccatccctctattgattttacccgcgttccggaaatgctgcaggcgcaacggaattttattctcgcgcaagtgagtcgcgtcgccaagagccggatcgtgtacgagccgttgtcgtcgtggcgagacgcgacggccgcccgcgcgttggccattcccgggattgcccaggccggttggacgttggccgatttgaccaccgccagtggacaaggcaaggaagcggatcgtcagaagagtgccctcaaaactacgctgttggcaatgttacggaaaattgaagagcagcaatttgcgtggcctttccgggagcccgtagatctgacggaagttccggattatttgcaagtcgtgacgaccccgattgacttgtcgacaatggaaaagcggatccgggccgatctgtaccggtccaagcaaatggcgtttgccgatctaatgctcatggtgaacaactgcaaattatacaatgacgacggaagcccgtatatggagtgtgcgactagtttggaacgatacgtgaagaatctctttcaacaagatacgggtacgacttctgtcggaggtgcggggtccaagagttag

SEQ ID NO: 500 - protein, 498 aa, Phaeodactylum tricornutum
MSASETGEVSRKRKAEEIEAEVAKGEPEKDDEPPAAAPTSDKVADEAEKEPDNDNTEASTLEQIDPSIKDSQGIDETAMMEVDQADISPTEDPLPASNSPAATGERDAESNLVEESTDTATNNREQALEDSVGASKDAQNVYDSLRWIVVRNDGEPDSMIKLVGLKSLFSKQLPKMPRAYIARLVFDRRHTSLAILNDNPDVKDSDEEIIGGICYRAFPEMRFAEIAFCAVNASHQVKGYGTKLMNLLKKIGAETGIEYFITYADNYAIGYFKKQGFAKNISMPKGRYFGLIKDYDGGTPMECYVHPSIDFTRVPEMLQAQRNFILAQVSRVAKSRIVYEPLSSWRDATAARALAIPGIAQAGWTLADLTTASGQGKEADRQKSALKTTLLAMLRKIEEQQFAWPFREPVDLTEVPDYLQVVTTPIDLSTMEKRIRADLYRSKQMAFADLMLMVNNCKLYNDDGSPYMECATSLERYVKNLFQQDTGTTSVGGAGSKS

SEQ ID NO: 501 - protein, 50 aa, Artificial sequence
  motif 31
  VARIANT (4)..(4): / replace = "Leu"
  VARIANT (6)..(6): / replace = "Leu"
  VARIANT (13)..(13): / replace = "Gln"
  VARIANT (16)..(16): / replace = "Val"
  VARIANT (19)..(19): / replace = "Val"
  VARIANT (45)..(45): / replace = "Thr"
  VARIANT (49)..(49): / replace = "Val"
LKFVCYSNDGVDEHMIWLIGLKNIFARQLPNMPKEYIVRLVMDRSHKSMM

SEQ ID NO: 502 - protein, 50 aa, Artificial sequence
  motif 32
  VARIANT (29)..(29): / replace = "Tyr"
  VARIANT (33)..(33): / replace = "Val"
FGEIAFCAITADEQVKGYGTRLMNHLKQHARDADGLTHFLTYADNNAVGY

SEQ ID NO: 503 - protein, 50 aa, Artificial sequence
  motif 33
  VARIANT (2)..(2): / replace = "Pro"
  VARIANT (13)..(13): / replace = "Ala"
  VARIANT (27)..(27): / replace = "Met"
  VARIANT (32)..(32): / replace = "Ile"
  VARIANT (34)..(34): / replace = "Arg"
  VARIANT (37)..(37): / replace = "Asp"
HADAWPFKEPVDSRDVPDYYDIIKDPIDLKTMSKRVESEQYYVTLEMFVA

SEQ ID NO: 504 - protein, 50 aa, Artificial sequence
  motif 34
  VARIANT (4)..(4): / replace = "Val"
  VARIANT (6)..(6): / replace = "Leu"
  VARIANT (11)..(11): / replace = "Ile"
  VARIANT (16)..(16): / replace = "Val"
  VARIANT (19)..(19): / replace = "Val"
  VARIANT (45)..(45): / replace = "Ser"
  VARIANT (49)..(49): / replace = "Val"
LKFLCYSNDGVDEHMIWLIGLKNIFARQLPNMPKEYIVRLVMDRTHKSMM

SEQ ID NO: 505 - protein, 50 aa, Artificial sequence; identical to SEQ ID NO: 502
  motif 35
  VARIANT (32)..(32): / replace = "Val" / replace = "Met"

SEQ ID NO: 506 - protein, 50 aa, Artificial sequence
  motif 36
  VARIANT (9)..(9): / replace = "His" / replace = "Tyr"
  VARIANT (10)..(10): / replace = "Phe"
  VARIANT (11)..(11): / replace = "Asp"
  VARIANT (13)..(13): / replace = "Asp"
  VARIANT (16)..(16): / replace = "His"
  VARIANT (34)..(34): / replace = "Gln"
  VARIANT (39)..(39): / replace = "Val"
  VARIANT (42)..(42): / replace = "Ser"
KQGFTKEITLDKERWQGYIKDYDGGILMECKIDPKLPYTDLATMIRRQRQ

SEQ ID NO: 507 - protein, 50 aa, Artificial sequence
  motif 37
  VARIANT (6)..(6): / replace = "Tyr"
  VARIANT (10)..(10): / replace = "Asp" / replace = "Ser"
  VARIANT (11)..(11): / replace = "Ile"
  VARIANT (16)..(16): / replace = "Met"
  VARIANT (17)..(17): / replace = "Cys" / replace = "Arg"
  VARIANT (41)..(41): / replace = "Leu"
  VARIANT (45)..(45): / replace = "Gly" / replace = "Lys"
LKFVCLSNDGVDEHMVWLIGLKNIFARQLPNMPKEYIVRLVMDRSHKSVM

SEQ ID NO: 508 - protein, 50 aa, Artificial sequence
  motif 38
  VARIANT (23)..(23): / replace = "Phe" / replace = "Tyr"
  VARIANT (27)..(27): / replace = "Val"
  VARIANT (46)..(46): / replace = "Val"
CAITADEQVKGYGTRLMNHLKQHARDMDGLTHFLTYADNNAVGYFIKQGF

SEQ ID NO: 509 - protein, 50 aa, Artificial sequence
  motif 39
  VARIANT (2)..(2): / replace = "His"
  VARIANT (4)..(4): / replace = "Phe"
  VARIANT (12)..(12): / replace = "Leu"
  VARIANT (20)..(20): / replace = "Gln"
  VARIANT (23)..(23): / replace = "Ser"
  VARIANT (29)..(29): / replace = "Ser"
  VARIANT (33)..(33): / replace = "Gln"
  VARIANT (36)..(36): / replace = "Lys"
  VARIANT (41)..(41): / replace = "Arg"
  VARIANT (49)..(49): / replace = "Gln"
  VARIANT (50)..(50): / replace = "Asn"
WQGYIKDYDGGILMECKIDPKLPYTDLSTMIRRQRQAIDEKIRELSNCHI

SEQ ID NO: 510 - protein, 50 aa, Artificial sequence
  motif 40
FLCYSNDGVDEHMIWLVGLKNIFARQLPNMPKEYIVRLVMDRTHKSMMVI

SEQ ID NO: 511 - protein, 50 aa, Artificial sequence
  motif 41
  VARIANT (29)..(29): / replace = "Leu"
  VARIANT (40)..(40): / replace = "Phe"
MNHLKQHARDADGLTHFLTYADNNAVGYFVKQGFTKEITLDKERWQGYIK

SEQ ID NO: 512 - protein, 50 aa, Artificial sequence
  motif 42
  VARIANT (3)..(3): / replace = "Asp"
  VARIANT (12)..(12): / replace = "Pro"
  VARIANT (32)..(32): / replace = "Thr"
  VARIANT (33)..(33): / replace = "Ile"
  VARIANT (39)..(39): / replace = "Gln"
  VARIANT (46)..(46): / replace = "Leu"
IRELSNCHIVYSGIDFQKKEAGIPRRLMKPEDIPGLREAGWTPDQWGHSK

SEQ ID NO: 513 - DNA, 2194 bp, Oryza sativa; identical to SEQ ID NO: 184

SEQ ID NO: 514 - DNA, 1244 bp, Oryza sativa
aaaaccaccgagggacctgatctgcaccggttttgatagttgagggacccgttgtgtctggttttccgatcgagggacgaaaatcggattcggtgtaaagttaagggacctcagatgaacttattccggagcatgattgggaagggaggacataaggcccatgtcgcatgtgtttggacggtccagatctccagatcactcagcaggatcggccgcgttcgcgtagcacccgcggtttgattcggcttcccgcaaggcggcggccggtggccgtgccgccgtagcttccgccggaagcgagcacgccgccgccgccgacccggctctgcgtttgcaccgccttgcacgcgatacatcgggatagatagctactactctctccgtttcacaatgtaaatcattctactattttccacattcatattgatgttaatgaatatagacatatatatctatttagattcattaacatcaatatgaatgtaggaaatgctagaatgacttacattgtgaattgtgaaatggacgaagtacctacgatggatggatgcaggatcatgaaagaattaatgcaagatcgtatctgccgcatgcaaaatcttactaattgcgctgcatatatgcatgacagcctgcatgcgggcgtgtaagcgtgttcatccattaggaagtaaccttgtcattacttataccagtactacatactatatagtattgatttcatgagcaaatctacaaaactggaaagcaataagaaatacgggactggaaaagactcaacattaatcaccaaatatttcgccttctccagcagaatatatatctctccatcttgatcactgtacacactgacagtgtacgcataaacgcagcagccagcttaactgtcgtctcaccgtcgcacactggccttccatctcaggctagctttctcagccacccatcgtacatgtcaactcggcgcgcgcacaggcacaaattacgtacaaaacgcatgaccaaatcaaaaccaccggagaagaatcgctcccgcgcgcggcggcgacgcgcacgtacgaacgcacgcacgcacgcccaaccccacgacacgatcgcgcgcgacgccggcgacaccggccgtccacccgcgccctcacctcgccgactataaatacgtaggcatctgcttgatcttgtcatccatctcaccaccaaaaaaaaaaggaaaaaaaaacaaaacacaccaagccaaataaaagcgacaa

SEQ ID NO: 515 - DNA, 51 bp, Artificial sequence
  primer: prm10643
ggggacaagtttgtacaaaaaagcaggcttaaacaatggacggcctcgcgg

SEQ ID NO: 516 - DNA, 50 bp, Artificial sequence
  primer: prm10644
ggggaccactttgtacaagaaagctgggtaagtgactacccaatgcgccc

SEQ ID NO: 517 - DNA, 56 bp, Artificial sequence
  primer: prm07323
ggggacaagtttgtacaaaaaagcaggcttaaacaatggactctcactcttcccac

SEQ ID NO: 518 - DNA, 54 bp, Artificial sequence
  primer: prm07324
ggggaccactttgtacaagaaagctgggtacctctaccatcttcttctattgag

1-127. (canceled)

128. A method for enhancing a yield-related trait in a plant relative to a corresponding control plant, comprising modulating expression in a plant of a nucleic acid encoding:
(i) a leucoanthocyanidin dioxygenase (LDOX) polypeptide, wherein said LDOX polypeptide comprises an Isopenicillin N synthase domain (PRINTS entry PRO0682) and a 200-Fe(II) oxygenase domain (PFAM entry PF03171);
(ii) a YRP5 polypeptide, wherein the YPR5 polypeptide comprises the polypeptide of SEQ ID NO: 186 or SEQ ID NO: 188 or an orthologue or paralogue of either;
(iii) a Casein Kinase 1 (CK1) polypeptide;
(iv) a basic Helix Loop Helix group 12 (bHLH12)-like polypeptide;
(v) an ADH2 polypeptide, wherein said ADH2 polypeptide comprises:
a. a GROES Domain (Domain 1): AGEVRVKILFTALCHTDHYTWSGKDPEGLFP CILGHEAAGVVESVGEGVTEVQPGDHVIPCYQAECKECKFCKSGKTNLCG KVRGATGVGVMMNDMKSRFSVNGKPIYHFTGTSTFSQYTVVHDVSVAKI (SEQ ID NO: 442), or a domain having at least 50% sequence identity to Domain 1; and
b. a Zinc-binding dehydrogenase domain (Domain 2):AGSIVAVFGLGTVGLAVA EGAKAAGASRIIGIDIDNKKFDVAKNFGVTEFVNPKDHDKPIQQVLVDLTD GGVDYSFECIGNVSVMRAALECCHKDWGTSVIVGVAASGQEIATRPFQLV TGRVWKGTAFGGFKSRTQVPWLVD (SEQ ID NO: 443), or a domain having at least 50% sequence identity to Domain 2; and optionally
c. a DUF61 Domain (Domain 3): VDKYMNKEVK (SEQ ID NO: 444), or a domain having at least 50% sequence identity to Domain 3; or
(vi) a GCN5-like polypeptide, wherein said GCN5-like polypeptide comprises a domain with PFam accession number PF00583 and a domain with PFam accession number PF00439,
wherein said enhanced yield-related trait is increased abiotic stress resistance when said nucleic acid encodes the polypeptide of SEQ ID NO: 186 or SEQ ID NO: 188 or an orthologue or paralogue of either.

129. The method of claim 128, wherein
(i) the LDOX polypeptide comprises one or more of the motifs 1 to 9 (SEQ ID NO: 173-181);
(ii) the CK1 polypeptide comprises a protein motif having at least 50% sequence identity to one or more of the following motifs:
(SEQ ID NO: 276)
a. Motif 13:
KANQVY[IV]ID[YF]GLAKKYRDLQTH[KR]HIPYRENKNLTGTARY
ASVNTHLG[VI]EQ;
(SEQ ID NO: 277)
b. Motif 14:
CKSYPSEF[VTI]SYFHYCRSLRFEDKPDYSYLKRLFRDLFIREGY
QFDYVFDW;
and
(SEQ ID NO: 278)
c. Motif 15:
PSLEDLFNYC[NS]RK[FL][ST]LKTVLMLADQ[LM]INRVEYMHSRG
FLHRDIKPDNFLM;
(iii) the bHLH12-like polypeptide comprises a protein motif having at least 50% sequence identity to one or more of motifs 16 to 19 (SEQ ID NO: 404-407);
(iv) the ADH2 polypeptide comprises one or more of Motifs 20 to 30 as shown below, or a Motif having at least 50% sequence identity to Domain 3 and any one of Motifs 20 to 30 as shown below:
(SEQ ID NO: 445)
a. Motif 20: HYTWSGKDP;
(SEQ ID NO: 446)
b. Motif 21: PCYQAECK;
(SEQ ID NO: 447)
c. Motif 22: GKTNLCGKVRGATGVGVMMND;
(SEQ ID NO: 448)
d. Motif 23:
YHFMGTSTFSQYTVVHDVSVAKINPQAPLDKVCLLGCGVPTGLG;
(SEQ ID NO: 449)
e. Motif 24: WNTAKVEAGSIVAVFGLGTVGLAVAEG;
(SEQ ID NO: 450)
f. Motif 25: GASRIIGIDIDNKKFDVAKNFGVTEFVN;
(SEQ ID NO: 451)
g. Motif 26: KDHDKPIQLVLVDIAD;
(SEQ ID NO: 452)
h. Motif 27: SVRRAAEEC;
(SEQ ID NO: 453)
i. Motif 28:
WGTSVIVGVAASGQEIATRPFQLVTGRVWKGTAFGGF;
(SEQ ID NO: 454)
j. Motif 29: KVDEYITH;
and
(SEQ ID NO: 455)
k. Motif 30: MLKGESIRCIITM;
or
(v) the GCN5 polypeptide also comprises the following motifs:
(SEQ ID NO: 501)
a. Motif 31:
LKF[VL]C[YL]SNDGVD[EQ]HM[IV]WL[IV]GLKNIFARQLPNMPKE
YIVRLVMDR[ST]HKS[MV]M,
(SEQ ID NO: 502)
b. Motif 32:
FGEIAFCAITADEQVKGYGTRLMNHLKQ[HY]ARD[AV]DGLTHFL
TYADNNAVGY,
(SEQ ID NO: 503)
c. Motif 33:
H[AP]DAWPFKEPVD[SA]RDVPDYYDIIKDP[IM]DLKT[MI]S[KR]R
V[ED]SEQYYVTLEMFVA,
wherein amino acid residues between brackets represent alternative amino acids at that position.

130. The method of claim 128, wherein the modulated expression is effected by introducing and expressing in a plant, plant cell, or part thereof a nucleic acid encoding a protein selected from the group consisting of: a LDOX polypeptide, a YRP5 polypeptide, a CK1 polypeptide, a bHLH12-like polypeptide, an ADH2 polypeptide, and a GCN5 polypeptide.

131. The method of claim 128, wherein
(i) the nucleic acid encoding an LDOX polypeptide comprises:
(a) a nucleotide encoding any one of the proteins listed in Table A1;
(b) a nucleotide that is a portion of the nucleotide of (a); or
(c) a nucleotide capable of hybridizing with the nucleotide of (a) or (b);
(ii) the nucleic acid encoding a YRP5 polypeptide comprises:
(a) a nucleotide encoding any one of the proteins listed in Table A2;
(b) a nucleotide that is a portion of the nucleotide of (a); or
(c) a nucleotide capable of hybridizing with the nucleotide of (a) or (b);
(iii) the nucleic acid encoding a CK1 polypeptide comprises:
(a) a nucleotide encoding any one of the proteins listed in Table A3;
(b) a nucleotide that is a portion of the nucleotide of (a); or
(c) a nucleotide capable of hybridizing with the nucleotide of (a) or (b);
(iv) the nucleic acid encoding a bHLH12-like polypeptide comprises:
(a) a nucleotide encoding any one of the proteins listed in Table A4;
(b) a nucleotide that is a portion of the nucleotide of (a); or
(c) a nucleotide capable of hybridizing with the nucleotide of (a) or (b);
(v) the nucleic acid encoding an ADH2 polypeptide comprises:
(a) a nucleotide encoding any one of the proteins listed in Table A5;
(b) a nucleotide that is a portion of the nucleotide of (a); or
(c) a nucleotide capable of hybridizing with the nucleotide of (a) or (b); or
(vi) the nucleic acid encoding a GCN5 polypeptide comprises:
(a) a nucleotide encoding any one of the proteins listed in Table A6;
(b) a nucleotide that is a portion of the nucleotide of (a); or
(c) a nucleotide capable of hybridizing with the nucleotide of (a) or (b);

132. The method of claim 128, wherein the nucleic acid sequence encodes an orthologue or paralogue of any of the proteins given in any of Tables A1 to A6.

133. The method of claim 128, wherein the enhanced yield-related trait comprises increased early vigour and/or increased yield, relative to a corresponding control plant.

134. The method of claim 128, wherein the enhanced yield-related trait is obtained under non-stress conditions or abiotic stress conditions, wherein said abiotic stress conditions comprise one or more conditions of nitrogen deficiency, salt stress, and drought stress.

135. The method of claim 130, wherein the nucleic acid encoding an LDOX polypeptide, a YRP5 polypeptide, a CK1 polypeptide, a bHLH12 polypeptide, or a GCN5 polypeptide is operably linked to a constitutive promoter, a GOS2 promoter, or a GOS2 promoter from rice, and wherein the nucleic acid encoding an ADH2 polypeptide is operably linked to a seed-specific promoter, a putative proteinase inhibitor promoter, or a putative proteinase inhibitor promoter from rice.

136. The method of claim 128, wherein the nucleic acid is of plant origin, from a dicotyledonous plant, or from a monocotyledonous plant.

137. A plant or part thereof, including seeds, obtained by the method of claim 128, wherein said plant or part thereof comprises a recombinant nucleic acid encoding a polypeptide as defined in claim 128.

138. A construct comprising:
(i) a nucleic acid encoding a polypeptide as defined in claim 128;
(ii) one or more control sequences capable of driving expression of the nucleic acid sequence of (i); and optionally (iii) a transcription termination sequence.

139. The construct of claim 138, wherein one of said control sequences is a constitutive promoter, a GOS2 promoter, a seed-specific promoter, or a putative proteinase inhibitor promoter.

140. A method of making a plant having increased early vigour, increased yield, increased biomass, and/or increased seed yield relative to a corresponding control plant, comprising transforming a plant, plant part, or plant cell with the construct of claim 138.

141. A plant, plant part, or plant cell comprising the construct of claim 138.

142. A method for the production of a transgenic plant having increased early vigour, increased yield, increased biomass, and/or increased seed yield, relative to a corresponding control plant, comprising:
(i) introducing and expressing in a plant, plant part, or plant cell a nucleic acid encoding a polypeptide as defined in claim 128; and
(ii) cultivating the plant, plant part, or plant cell under conditions promoting plant growth and development or under conditions of abiotic stress.

143. A transgenic plant having increased early vigour, increased yield, increased biomass, and/or increased seed yield under non-stress conditions or under abiotic stress conditions relative to a corresponding control plant, wherein the early vigour, increased yield, increased biomass, and/or increased seed yield results from modulated expression of a nucleic acid encoding a polypeptide as defined in claim 128, or a transgenic plant cell derived from said transgenic plant.

144. The transgenic plant of claim 137, or a transgenic plant cell derived therefrom, wherein said plant is a crop plant, a monocot, a cereal, rice, maize, wheat, barley, millet, rye, triticale, sorghum, emmer, spelt, secale, einkorn, teff, milo, or oats.

145. Harvestable parts of the plant of claim 144, wherein the harvestable parts are shoot biomass, root biomass, and/or seeds.

146. A product derived from the plant of claim 144 and/or from harvestable parts of said plant, wherein said harvestable parts are shoot biomass, root biomass, and/or seeds.

147. An isolated nucleic acid molecule selected from the group consisting of:
(i) the nucleic acid of SEQ ID NO: 210, 212, 216, 220, 228, 268, 279, or 335;
(ii) the complement of the nucleic acid of SEQ ID NO: 210, 212, 216, 220, 228, 268, 279, or 335;
(iii) a nucleic acid that encodes the polypeptide of SEQ ID NO: 211, 213, 217, 221, 229, 269, 280, or 336, and confers an enhanced yield-related trait to a plant relative to a corresponding control plant;
(iv) a nucleic acid that has at least 30% sequence identity to any of the nucleic acid sequences of Table A3 or A4, and confers an enhanced yield-related trait to a plant relative to a corresponding control plant;
(v) a nucleic acid molecule that hybridizes with any of the nucleic acid molecules of (i) to (iv) under stringent hybridization conditions, and confers an enhanced yield-related trait to a plant relative to a corresponding control plant;
(vi) a nucleic acid that encodes a CK1 polypeptide having at least 50% sequence identity to the amino acid sequence of SEQ ID NO: 211, 213, 217, 221, 229, or 269, or any of the other amino acid sequences in Table A3, and confers an enhanced yield-related trait to a plant relative to a corresponding control plant; and
(vii) a nucleic acid that encodes a bHLH12-like polypeptide having at least 50% sequence identity to the amino acid sequence of SEQ ID NO: 280 or 336, or any of the other amino acid sequences in Table A4, and confers an enhanced yield-related trait to a plant relative to a corresponding control plant.

148. An isolated polypeptide selected from the group consisting of:
(i) the amino acid sequence of SEQ ID NO: 211, 213, 217, 221, 229, 269, 280, or 336;
(ii) an amino acid sequence that has at least 50% sequence identity to the amino acid sequence of SEQ ID NO: 211, 213, 217, 221, 229, 269, 280, or 336, or any of the other amino acid sequences in Table A3 or A4, and confers an enhanced yield-related trait to a plant relative to a corresponding control plant; and
(iii) derivatives of any of the amino acid sequences given in (i) or (ii) above.
